(19) United States
(12) Patent Application Publication
(10) Pub. No.: US 2003/0138438 A1
(43) Pub. Date: Jul. 24, 2003

(54) Compositions and methods for the therapy and diagnosis of lung cancer

(75) Inventors: Barbara Mericle, Edmonds, WA (US); Gary R. Fanger, Mill Creek, WA (US); Thomas S. Vedvick, Federal Way, WA (US); Darrick Carter, Seattle, WA (US); Yoshihiro Watanabe, Mercer Island, WA (US); Robert A. Henderson, Edmonds, WA (US); Michael D. Kalos, Seattle, WA (US); A. Gregory Spies, Shoreline, WA (US); Teresa M. Foy, Federal Way, WA (US); Liqun Fan, Bellevue, WA (US); Tongtong Wang, Medina, WA (US)

Correspondence Address: SEED INTELLECTUAL PROPERTY LAW GROUP PLLC, 701 FIFTH AVE, SUITE 6300, SEATTLE, WA, 98104-7092, US

(73) Assignee: Corixa Corporation, Seattle, WA (US)

(21) Appl. No.: 10/117,982

(22) Filed: Apr. 5, 2002

Related U.S. Application Data
(63) Continuation-in-part of application No. 10/007,700, filed on Nov. 30, 2001.
Application No. 10/007,700 is a continuation-in-part of application No. 09/897,778, filed on Jun. 28, 2001.
Application No. 09/897,778 is a continuation-in-part of application No. 09/850,716, filed on May 7, 2001.
Application No. 09/850,716 is a continuation-in-part of application No. 09/735,705, filed on Dec. 12, 2000.
Application No. 09/735,705 is a continuation-in-part of application No. 09/685,696, filed on Oct. 9, 2000.
Application No. 09/685,696 is a continuation-in-part of application No. 09/662,786, filed on Sep. 15, 2000, now abandoned.
Application No. 09/662,786 is a continuation-in-part of application No. 09/643,597, filed on Aug. 21, 2000, now Pat. No. 6,426,072.
Application No. 09/643,597 is a continuation-in-part of application No. 09/630,940, filed on Aug. 2, 2000.
Application No. 09/630,940 is a continuation-in-part of application No. 09/606,421, filed on Jun. 28, 2000.
Application No. 09/606,421 is a continuation-in-part of application No. 09/542,615, filed on Apr. 4, 2000.
Application No. 09/542,615 is a continuation-in-part of application No. 09/510,376, filed on Feb. 22, 2000.
Application No. 09/510,376 is a continuation-in-part of application No. 09/480,884, filed on Jan. 10, 2000.
Application No. 09/480,884 is a continuation-in-part of application No. 09/476,496, filed on Dec. 30, 1999.
Application No. 09/476,496 is a continuation-in-part of application No. 09/466,396, filed on Dec. 17, 1999.
Application No. 09/466,396 is a continuation-in-part of application No. 09/285,479, filed on Apr. 2, 1999.
Application No. 09/285,479 is a continuation-in-part of application No. 09/221,107, filed on Dec. 22, 1998.
Application No. 09/221,107 is a continuation-in-part of application No. 09/123,912, filed on Jul. 27, 1998, now Pat. No. 6,312,695.
Application No. 09/123,912 is a continuation-in-part of application No. 09/040,802, filed on Mar. 18, 1998, now abandoned.

(51) Int. Cl. A61K 39/00

(52) U.S. Cl. 424/185.1; 424/277.1

(57) ABSTRACT

Compositions and methods for the therapy and diagnosis of cancer, particularly lung cancer, are disclosed. Illustrative compositions comprise one or more lung tumor polypeptides, immunogenic portions thereof, polynucleotides that encode such polypeptides, antigen presenting cell that expresses such polypeptides, and T cells that are specific for cells expressing such polypeptides. The disclosed compositions are useful, for example, in the diagnosis, prevention and/or treatment of diseases, particularly lung cancer.

### TECHNICAL FIELD OF THE INVENTION

[0001] The present invention relates generally to therapy and diagnosis of cancer, such as lung cancer. The invention is more specifically related to polypeptides, comprising at least a portion of a lung tumor protein, and to polynucleotides encoding such polypeptides. Such polypeptides and polynucleotides are useful in pharmaceutical compositions, e.g., vaccines, and other compositions for the diagnosis and treatment of lung cancer.

### BACKGROUND OF THE INVENTION

[0002] 1. Field of the Invention

[0003] Cancer is a significant health problem throughout the world. Although advances have been made in detection and therapy of cancer, no vaccine or other universally successful method for prevention and/or treatment is currently available. Current therapies, which are generally based on a combination of chemotherapy or surgery and radiation, continue to prove inadequate in many patients.

[0004] 2. Description of Related Art

[0005] Lung cancer is the primary cause of cancer death among both men and women in the U.S., with an estimated 172,000 new cases being reported in 1994. The five-year survival rate among all lung cancer patients, regardless of the stage of disease at diagnosis, is only 13%. This contrasts with a five-year survival rate of 46% among cases detected while the disease is still localized. However, only 16% of lung cancers are discovered before the disease has spread.

[0006] In spite of considerable research into therapies for these and other cancers, lung cancer remains difficult to diagnose and treat effectively. Accordingly, there is a need in the art for improved methods for detecting and treating such cancers. The present invention fulfills these needs and further provides other related advantages.

### SUMMARY OF THE INVENTION

[0007] In one aspect, the present invention provides polynucleotide compositions comprising a sequence selected from the group consisting of:

[0008] (a) sequences provided in SEQ ID NO:1-3,6-8, 10-13, 15-27, 29, 30, 32, 34-49, 51, 52, 54, 55, 57-59, 61-69, 71, 73, 74, 77, 78, 80-82, 84, 86-96, 107-109, 111, 113, 125, 127, 128, 129, 131-133, 142, 144, 148-151, 153, 154, 157, 158, 160, 167, 168, 171, 179, 182, 184-186, 188-191, 193, 194, 198-207, 209, 210, 213, 214, 217, 220-224, 253-337, 345, 347, 349, 358, 362, 364, 365, 368, 370-375, 420, 424, 428, 431, 434, 442, 447, 450, 467, 478, 479 and 483;

[0009] (b) complements of the sequences provided in SEQ ID NO:1-3,6-8, 10-13, 15-27, 29, 30, 32, 34-49, 51, 52, 54, 55, 57-59, 61-69, 71, 73, 74, 77, 78, 80-82, 84, 86-96, 107-109, 111, 113, 125, 127, 128, 129, 131-133, 142, 144, 148-151, 153, 154, 157, 158, 160, 167, 168, 171, 179, 182, 184-186, 188-191, 193, 194, 198-207, 209, 210, 213, 214, 217, 220-224, 253-337, 345, 347, 349, 358, 362, 364, 365, 368, 370-375, 420, 424, 428, 431, 434, 442, 447, 450, 467, 478, 479 and 483;

[0010] (c) sequences consisting of at least 10, 15, 20, 25, 30, 35, 40, 45, 50, 75 and 100 contiguous residues of a sequence provided in SEQ ID NO:1-3,6-8, 10-13, 15-27, 29, 30, 32, 34-49, 51, 52, 54, 55, 57-59, 61-69, 71, 73, 74, 77, 78, 80-82, 84, 86-96, 107-109, 111, 113, 125, 127, 128, 129, 131-133, 142, 144, 148-151, 153, 154, 157, 158, 160, 167, 168, 171, 179, 182, 184-186, 188-191, 193, 194, 198-207, 209, 210, 213, 214, 217, 220-224, 253-337, 345, 347, 349, 358, 362, 364, 365, 368, 370-375, 420, 424, 428, 431, 434, 442, 447, 450, 467, 478, 479 and 483;

[0011] (d) sequences that hybridize to a sequence provided in SEQ ID NO:1-3, 6-8, 10-13, 15-27, 29, 30, 32, 34-49, 51, 52, 54, 55, 57-59, 61-69, 71, 73, 74, 77, 78, 80-82, 84, 86-96, 107-109, 111, 113, 125, 127, 128, 129, 131-133, 142, 144, 148-151, 153, 154, 157, 158, 160, 167, 168, 171, 179, 182, 184-186, 188-191, 193, 194, 198-207, 209, 210, 213, 214, 217, 220-224, 253-337, 345, 347, 349, 358, 362, 364, 365, 368, 370-375, 420, 424, 428, 431, 434, 442, 447, 450, 467, 478, 479 and 483, under moderate or highly stringent conditions;

[0012] (e) sequences having at least 75%, 80%, 85%, 90%, 95%, 96%, 97%, 98% or 99% identity to a sequence of SEQ ID NO:1-3,6-8, 10-13, 15-27, 29, 30, 32, 34-49, 51, 52, 54, 55, 57-59, 61-69, 71, 73, 74, 77, 78, 80-82, 84, 86-96, 107-109, 111, 113, 125, 127, 128, 129, 131-133, 142, 144, 148-151, 153, 154, 157, 158, 160, 167, 168, 171, 179, 182, 184-186, 188-191, 193, 194, 198-207, 209, 210, 213, 214, 217, 220-224, 253-337, 345, 347, 349, 358, 362, 364, 365, 368, 370-375, 420, 424, 428, 431, 434, 442, 447, 450, 467, 478, 479 and 483; and

[0013] (f) degenerate variants of a sequence provided in SEQ ID NO:1-3,6-8, 10-13, 15-27, 29, 30, 32, 34-49, 51, 52, 54, 55, 57-59, 61-69, 71, 73, 74, 77, 78, 80-82, 84, 86-96, 107-109, 111, 113, 125, 127, 128, 129, 131-133, 142, 144, 148-151, 153, 154, 157, 158, 160, 167, 168, 171, 179, 182, 184-186, 188-191, 193, 194, 198-207, 209, 210, 213, 214, 217, 220-224, 253-337, 345, 347, 349, 358, 362, 364, 365, 368, 370-375, 420, 424, 428, 431, 434, 442, 447, 450, 467, 478, 479 and 483.

[0014] In one preferred embodiment, the polynucleotide compositions of the invention are expressed in at least about 20%, more preferably in at least about 30%, and most preferably in at least about 50% of lung tumors samples tested, at a level that is at least about 2-fold, preferably at least about 5-fold, and most preferably at least about 10-fold higher than that for normal tissues.

[0015] The present invention, in another aspect, provides polypeptide compositions comprising an amino acid sequence that is encoded by a polynucleotide sequence described above.

[0016] The present invention further provides polypeptide compositions comprising an amino acid sequence selected from the group consisting of sequences recited in SEQ ID NO:152, 155, 156, 165, 166, 169, 170, 172, 174, 176, 226-252, 338-344, 346, 350, 357, 361, 363, 365, 367, 369, 376-382, 387-419, 423, 427, 430, 433, 441, 443, 446, 449, 451-466, 468-477, 480-482, and 484.

[0017] In certain preferred embodiments, the polypeptides and/or polynucleotides of the present invention are immunogenic, i.e., they are capable of eliciting an immune response, particularly a humoral and/or cellular immune response, as further described herein.

[0018] The present invention further provides fragments, variants and/or derivatives of the disclosed polypeptide and/or polynucleotide sequences, wherein the fragments, variants and/or derivatives preferably have a level of immunogenic activity of at least about 50%, preferably at least about 70% and more preferably at least about 90% of the level of immunogenic activity of a polypeptide sequence set forth in SEQ ID NO:152, 155, 156, 165, 166, 169, 170, 172, 174, 176, 226-252, 338-344, 346, 350, 357, 361, 363, 365, 367, 369, 376-382, 387-419, 423, 427, 430, 433, 441, 443, 446, 449 and 451-466, or a polypeptide sequence encoded by a polynucleotide sequence set forth in SEQ ID NO:1-3, 6-8, 10-13, 15-27, 29, 30, 32, 34-49, 51, 52, 54, 55, 57-59, 61-69, 71, 73, 74, 77, 78, 80-82, 84, 86-96, 107-109, 111, 113, 125, 127, 128, 129, 131-133, 142, 144, 148-151, 153, 154, 157, 158, 160, 167, 168, 171, 179, 182, 184-186, 188-191, 193, 194, 198-207, 209, 210, 213, 214, 217, 220-224, 253-337, 345, 347, 349, 358, 362, 364, 365, 368, 370-375, 420, 424, 428, 431, 434, 442, 447, 450, 467, 478, 479 and 483.

[0019] The present invention further provides polynucleotides that encode a polypeptide described above, expression vectors comprising such polynucleotides and host cells transformed or transfected with such expression vectors.

[0020] Within other aspects, the present invention provides pharmaceutical compositions comprising a polypeptide or polynucleotide as described above and a physiologically acceptable carrier.

[0021] Within a related aspect of the present invention, the pharmaceutical compositions, e.g., vaccine compositions, are provided for prophylactic or therapeutic applications. Such compositions generally comprise an immunogenic polypeptide or polynucleotide of the invention and an immunostimulant, such as an adjuvant.

[0022] The present invention further provides pharmaceutical compositions that comprise: (a) an antibody or antigen-binding fragment thereof that specifically binds to a polypeptide of the present invention, or a fragment thereof, and (b) a physiologically acceptable carrier.

[0023] Within further aspects, the present invention provides pharmaceutical compositions comprising: (a) an antigen presenting cell that expresses a polypeptide as described above and (b) a pharmaceutically acceptable carrier or excipient. Illustrative antigen presenting cells include dendritic cells, macrophages, monocytes, fibroblasts and B cells.

[0024] Within related aspects, pharmaceutical compositions are provided that comprise: (a) an antigen presenting cell that expresses a polypeptide as described above and (b) an immunostimulant.

[0025] The present invention further provides, in other aspects, fusion proteins that comprise at least one polypeptide as described above, as well as polynucleotides encoding such fusion proteins, typically in the form of pharmaceutical compositions, e.g., vaccine compositions, comprising a physiologically acceptable carrier and/or an immunostimulant. The fusions proteins may comprise multiple immunogenic polypeptides or portions/variants thereof, as described herein, and may further comprise one or more polypeptide segments for facilitating the expression, purification and/or immunogenicity of the polypeptide(s).

[0026] Within further aspects, the present invention provides methods for stimulating an immune response in a patient, preferably a T cell response in a human patient, comprising administering a pharmaceutical composition described herein. The patient may be afflicted with lung cancer, in which case the methods provide treatment for the disease, or patient considered at risk for such a disease may be treated prophylactically.

[0027] Within further aspects, the present invention provides methods for inhibiting the development of a cancer in a patient, comprising administering to a patient a pharmaceutical composition as recited above. The patient may be afflicted with lung cancer, in which case the methods provide treatment for the disease, or patient considered at risk for such a disease may be treated prophylactically.

[0028] The present invention further provides, within other aspects, methods for removing tumor cells from a biological sample, comprising contacting a biological sample with T cells that specifically react with a polypeptide of the present invention, wherein the step of contacting is performed under conditions and for a time sufficient to permit the removal of cells expressing the protein from the sample.

[0029] Within related aspects, methods are provided for inhibiting the development of a cancer in a patient, comprising administering to a patient a biological sample treated as described above.

[0030] Methods are further provided, within other aspects, for stimulating and/or expanding T cells specific for a polypeptide of the present invention, comprising contacting T cells with one or more of: (i) a polypeptide as described above; (ii) a polynucleotide encoding such a polypeptide; and/or (iii) an antigen presenting cell that expresses such a polypeptide; under conditions and for a time sufficient to permit the stimulation and/or expansion of T cells. Isolated T cell populations comprising T cells prepared as described above are also provided.

[0031] Within further aspects, the present invention provides methods for inhibiting the development of a cancer in a patient, comprising administering to a patient an effective amount of a T cell population as described above.

[0032] The present invention further provides methods for inhibiting the development of a cancer in a patient, comprising the steps of: (a) incubating CD4⁺ and/or CD8⁺ T cells isolated from a patient with one or more of: (i) a polypeptide comprising at least an immunogenic portion of polypeptide disclosed herein; (ii) a polynucleotide encoding such a polypeptide; and (iii) an antigen-presenting cell that expressed such a polypeptide; and (b) administering to the patient an effective amount of the proliferated T cells, and thereby inhibiting the development of a cancer in the patient. Proliferated cells may, but need not, be cloned prior to administration to the patient.

[0033] Within further aspects, the present invention provides methods for determining the presence or absence of a cancer, preferably a lung cancer, in a patient comprising: (a) contacting a biological sample obtained from a patient with a binding agent that binds to a polypeptide as recited above; (b) detecting in the sample an amount of polypeptide that binds to the binding agent; and (c) comparing the amount of polypeptide with a predetermined cut-off value, and therefrom determining the presence or absence of a cancer in the patient. Within preferred embodiments, the binding agent is an antibody, more preferably a monoclonal antibody.

[0034] The present invention also provides, within other aspects, methods for monitoring the progression of a cancer in a patient. Such methods comprise the steps of: (a) contacting a biological sample obtained from a patient at a first point in time with a binding agent that binds to a polypeptide as recited above; (b) detecting in the sample an amount of polypeptide that binds to the binding agent; (c) repeating steps (a) and (b) using a biological sample obtained from the patient at a subsequent point in time; and (d) comparing the amount of polypeptide detected in step (c) with the amount detected in step (b) and therefrom monitoring the progression of the cancer in the patient.

[0035] The present invention further provides, within other aspects, methods for determining the presence or absence of a cancer in a patient, comprising the steps of: (a) contacting a biological sample obtained from a patient with an oligonucleotide that hybridizes to a polynucleotide that encodes a polypeptide of the present invention; (b) detecting in the sample a level of a polynucleotide, preferably mRNA, that hybridizes to the oligonucleotide; and (c) comparing the level of polynucleotide that hybridizes to the oligonucleotide with a predetermined cut-off value, and therefrom determining the presence or absence of a cancer in the patient. Within certain embodiments, the amount of mRNA is detected via polymerase chain reaction using, for example, at least one oligonucleotide primer that hybridizes to a polynucleotide encoding a polypeptide as recited above, or a complement of such a polynucleotide. Within other embodiments, the amount of mRNA is detected using a hybridization technique, employing an oligonucleotide probe that hybridizes to a polynucleotide that encodes a polypeptide as recited above, or a complement of such a polynucleotide.

[0036] In related aspects, methods are provided for monitoring the progression of a cancer in a patient, comprising the steps of: (a) contacting a biological sample obtained from a patient with an oligonucleotide that hybridizes to a polynucleotide that encodes a polypeptide of the present invention; (b) detecting in the sample an amount of a polynucleotide that hybridizes to the oligonucleotide; (c) repeating steps (a) and (b) using a biological sample obtained from the patient at a subsequent point in time; and (d) comparing the amount of polynucleotide detected in step (c) with the amount detected in step (b) and therefrom monitoring the progression of the cancer in the patient.

[0037] Within further aspects, the present invention provides antibodies, such as monoclonal antibodies, that bind to a polypeptide as described above, as well as diagnostic kits comprising such antibodies. Diagnostic kits comprising one or more oligonucleotide probes or primers as described above are also provided.

[0038] These and other aspects of the present invention will become apparent upon reference to the following detailed description. All references disclosed herein are hereby incorporated by reference in their entirety as if each was incorporated individually.

### A BRIEF DESCRIPTION OF THE SEQUENCE IDENTIFIERS

[0039] SEQ ID NO:1 is the determined cDNA sequence for LST-S1-2

[0040] SEQ ID NO:2 is the determined cDNA sequence for LST-S1-28

[0041] SEQ ID NO:3 is the determined cDNA sequence for LST-S1-90

[0042] SEQ ID NO:4 is the determined cDNA sequence for LST-S1-144

[0043] SEQ ID NO:5 is the determined cDNA sequence for LST-S1-133

[0044] SEQ ID NO:6 is the determined cDNA sequence for LST-S1-169

[0045] SEQ ID NO:7 is the determined cDNA sequence for LST-S2-6

[0046] SEQ ID NO:8 is the determined cDNA sequence for LST-S2-11

[0047] SEQ ID NO:9 is the determined cDNA sequence for LST-S2-17

[0048] SEQ ID NO:10 is the determined cDNA sequence for LST-S2-25

[0049] SEQ ID NO:11 is the determined cDNA sequence for LST-S2-39

[0050] SEQ ID NO:12 is a first determined cDNA sequence for LST-S2-43

[0051] SEQ ID NO:13 is a second determined cDNA sequence for LST-S2-43

[0052] SEQ ID NO:14 is the determined cDNA sequence for LST-S2-65

[0053] SEQ ID NO:15 is the determined cDNA sequence for LST-S2-68

[0054] SEQ ID NO:16 is the determined cDNA sequence for LST-S2-72

[0055] SEQ ID NO:17 is the determined cDNA sequence for LST-S2-74

[0056] SEQ ID NO:18 is the determined cDNA sequence for LST-S2-103

[0057] SEQ ID NO:19 is the determined cDNA sequence for LST-S2-N1-1F

[0058] SEQ ID NO:20 is the determined cDNA sequence for LST-S2-N-1-2A

[0059] SEQ ID NO:21 is the determined cDNA sequence for LST-S2-N-1-4H

[0060] SEQ ID NO:22 is the determined cDNA sequence for LST-S2-N-1-5A

[0061] SEQ ID NO:23 is the determined cDNA sequence for LST-S2-N1-6B

[0062] SEQ ID NO:24 is the determined cDNA sequence for LST-S2-N-1-7B

[0063] SEQ ID NO:25 is the determined cDNA sequence for LST-S2-N-1-7H

[0064] SEQ ID NO:26 is the determined cDNA sequence for LST-S2-N-1-8A

[0065] SEQ ID NO:27 is the determined cDNA sequence for LST-S2-N-1-8D

[0066] SEQ ID NO:28 is the determined cDNA sequence for LST-S2-N-1-9A

[0067] SEQ ID NO:29 is the determined cDNA sequence for LST-S2-N-1-9E

[0068] SEQ ID NO:30 is the determined cDNA sequence for LST-S2-N1-10A

[0069] SEQ ID NO:31 is the determined cDNA sequence for LST-S2-N-1-10G

[0070] SEQ ID NO:32 is the determined cDNA sequence for LST-S2-N1-11A

[0071] SEQ ID NO:33 is the determined cDNA sequence for LST-S2-N1-12C

[0072] SEQ ID NO:34 is the determined cDNA sequence for LST-S2-N-1-12E

[0073] SEQ ID NO:35 is the determined cDNA sequence for LST-S2-B1-3D

[0074] SEQ ID NO:36 is the determined cDNA sequence for LST-S2-B1-6C

[0075] SEQ ID NO:37 is the determined cDNA sequence for LST-S2-B1-5D

[0076] SEQ ID NO:38 is the determined cDNA sequence for LST-S2-B1-5F

[0077] SEQ ID NO:39 is the determined cDNA sequence for LST-S2-B1-6G

[0078] SEQ ID NO:40 is the determined cDNA sequence for LST-S2-B1-8A

[0079] SEQ ID NO:41 is the determined cDNA sequence for LST-S2-B1-8D

[0080] SEQ ID NO:42 is the determined cDNA sequence for LST-S2-B1-10A

[0081] SEQ ID NO:43 is the determined cDNA sequence for LST-S2-B1-9B

[0082] SEQ ID NO:44 is the determined cDNA sequence for LST-S2-B1-9F

[0083] SEQ ID NO:45 is the determined cDNA sequence for LST-S2-B1-12D

[0084] SEQ ID NO:46 is the determined cDNA sequence for LST-S2-I2-2B

[0085] SEQ ID NO:47 is the determined cDNA sequence for LST-S2-I2-5F

[0086] SEQ ID NO:48 is the determined cDNA sequence for LST-S2-I2-6B

[0087] SEQ ID NO:49 is the determined cDNA sequence for LST-S2-I2-7F

[0088] SEQ ID NO:50 is the determined cDNA sequence for LST-S2-I2-8G

[0089] SEQ ID NO:51 is the determined cDNA sequence for LST-S2-I2-9E

[0090] SEQ ID NO:52 is the determined cDNA sequence for LST-S2-I2-12B

[0091] SEQ ID NO:53 is the determined cDNA sequence for LST-S2-H2-2C

[0092] SEQ ID NO:54 is the determined cDNA sequence for LST-S2-H2-1G

[0093] SEQ ID NO:55 is the determined cDNA sequence for LST-S2-H2-4G

[0094] SEQ ID NO:56 is the determined cDNA sequence for LST-S2-H2-3H

[0095] SEQ ID NO:57 is the determined cDNA sequence for LST-S2-H2-5G

[0096] SEQ ID NO:58 is the determined cDNA sequence for LST-S2-H2-9B

[0097] SEQ ID NO:59 is the determined cDNA sequence for LST-S2-H2-10H

[0098] SEQ ID NO:60 is the determined cDNA sequence for LST-S2-H2-12D

[0099] SEQ ID NO: 61 is the determined cDNA sequence for LST-S3-2

[0100] SEQ ID NO: 62 is the determined cDNA sequence for LST-S3-4

[0101] SEQ ID NO: 63 is the determined cDNA sequence for LST-S3-7

[0102] SEQ ID NO: 64 is the determined cDNA sequence for LST-S3-8

[0103] SEQ ID NO: 65 is the determined cDNA sequence for LST-S3-12

[0104] SEQ ID NO: 66 is the determined cDNA sequence for LST-S3-13

[0105] SEQ ID NO: 67 is the determined cDNA sequence for LST-S3-14

[0106] SEQ ID NO: 68 is the determined cDNA sequence for LST-S3-16

[0107] SEQ ID NO: 69 is the determined cDNA sequence for LST-S3-21

[0108] SEQ ID NO: 70 is the determined cDNA sequence for LST-S3-22

[0109] SEQ ID NO: 71 is the determined cDNA sequence for LST-S1-7

[0110] SEQ ID NO: 72 is the determined cDNA sequence for LST-S1-A-1E

[0111] SEQ ID NO: 73 is the determined cDNA sequence for LST-S1-A-1G

[0112] SEQ ID NO: 74 is the determined cDNA sequence for LST-S1-A-3E

[0113] SEQ ID NO: 75 is the determined cDNA sequence for LST-S1-A-4E

[0114] SEQ ID NO: 76 is the determined cDNA sequence for LST-S1-A-6D

[0115] SEQ ID NO: 77 is the determined cDNA sequence for LST-S1-A-8D

[0116] SEQ ID NO: 78 is the determined cDNA sequence for LST-S1-A-10A

[0117] SEQ ID NO: 79 is the determined cDNA sequence for LST-S1-A-10C

[0118] SEQ ID NO: 80 is the determined cDNA sequence for LST-S1-A-9D

[0119] SEQ ID NO: 81 is the determined cDNA sequence for LST-S1-A-10D

[0120] SEQ ID NO: 82 is the determined cDNA sequence for LST-S1-A-9H

[0121] SEQ ID NO: 83 is the determined cDNA sequence for LST-S1-A-11D

[0122] SEQ ID NO: 84 is the determined cDNA sequence for LST-S1-A-12D

[0123] SEQ ID NO: 85 is the determined cDNA sequence for LST-S1-A-1E

[0124] SEQ ID NO: 86 is the determined cDNA sequence for LST-S1-A-12E

[0125] SEQ ID NO: 87 is the determined cDNA sequence for L513S (T3).

[0126] SEQ ID NO: 88 is the determined cDNA sequence for L513S contig 1.

[0127] SEQ ID NO: 89 is a first determined cDNA sequence for L514S.

[0128] SEQ ID NO: 90 is a second determined cDNA sequence for L514S.

[0129] SEQ ID NO: 91 is a first determined cDNA sequence for L516S.

[0130] SEQ ID NO: 92 is a second determined cDNA sequence for L516S.

[0131] SEQ ID NO: 93 is the determined cDNA sequence for L517S.

[0132] SEQ ID NO: 94 is the extended cDNA sequence for LST-S1-169 (also known as L519S).

[0133] SEQ ID NO: 95 is a first determined cDNA sequence for L520S.

[0134] SEQ ID NO: 96 is a second determined cDNA sequence for L520S.

[0135] SEQ ID NO: 97 is a first determined cDNA sequence for L521S.

[0136] SEQ ID NO: 98 is a second determined cDNA sequence for L521 S.

[0137] SEQ ID NO: 99 is the determined cDNA sequence for L522S.

[0138] SEQ ID NO: 100 is the determined cDNA sequence for L523S.

[0139] SEQ ID NO: 101 is the determined cDNA sequence for L524S.

[0140] SEQ ID NO: 102 is the determined cDNA sequence for L525S.

[0141] SEQ ID NO: 103 is the determined cDNA sequence for L526S.

[0142] SEQ ID NO: 104 is the determined cDNA sequence for L527S.

[0143] SEQ ID NO: 105 is the determined cDNA sequence for L528S.

[0144] SEQ ID NO: 106 is the determined cDNA sequence for L529S.

[0145] SEQ ID NO: 107 is a first determined cDNA sequence for L530S.

[0146] SEQ ID NO: 108 is a second determined cDNA sequence for L530S.

[0147] SEQ ID NO: 109 is the determined full-length cDNA sequence for L531S short form

[0148] SEQ ID NO: 110 is the amino acid sequence encoded by SEQ ID NO: 109.

[0149] SEQ ID NO: 111 is the determined full-length cDNA sequence for L531S long form

[0150] SEQ ID NO: 112 is the amino acid sequence encoded by SEQ ID NO: 111.

[0151] SEQ ID NO: 113 is the determined full-length cDNA sequence for L520S.

[0152] SEQ ID NO: 114 is the amino acid sequence encoded by SEQ ID NO: 113.

[0153] SEQ ID NO: 115 is the determined cDNA sequence for contig 1.

[0154] SEQ ID NO: 116 is the determined cDNA sequence for contig 3.

[0155] SEQ ID NO: 117 is the determined cDNA sequence for contig 4.

[0156] SEQ ID NO: 118 is the determined cDNA sequence for contig 5.

[0157] SEQ ID NO: 119 is the determined cDNA sequence for contig 7.

[0158] SEQ ID NO: 120 is the determined cDNA sequence for contig 8.

[0159] SEQ ID NO: 121 is the determined cDNA sequence for contig 9.

[0160] SEQ ID NO: 122 is the determined cDNA sequence for contig 10.

[0161] SEQ ID NO: 123 is the determined cDNA sequence for contig 12.

[0162] SEQ ID NO: 124 is the determined cDNA sequence for contig 11.

[0163] SEQ ID NO: 125 is the determined cDNA sequence for contig 13 (also known as L761P).

[0164] SEQ ID NO: 126 is the determined cDNA sequence for contig 15.

[0165] SEQ ID NO: 127 is the determined cDNA sequence for contig 16.

[0166] SEQ ID NO: 128 is the determined cDNA sequence for contig 17.

[0167] SEQ ID NO: 129 is the determined cDNA sequence for contig 19.

[0168] SEQ ID NO: 130 is the determined cDNA sequence for contig 20.

[0169] SEQ ID NO: 131 is the determined cDNA sequence for contig 22.

[0170] SEQ ID NO: 132 is the determined cDNA sequence for contig 24.

[0171] SEQ ID NO: 133 is the determined cDNA sequence for contig 29.

[0172] SEQ ID NO: 134 is the determined cDNA sequence for contig 31.

[0173] SEQ ID NO: 135 is the determined cDNA sequence for contig 33.

[0174] SEQ ID NO: 136 is the determined cDNA sequence for contig 38.

[0175] SEQ ID NO: 137 is the determined cDNA sequence for contig 39.

[0176] SEQ ID NO: 138 is the determined cDNA sequence for contig 41.

[0177] SEQ ID NO: 139 is the determined cDNA sequence for contig 43.

[0178] SEQ ID NO: 140 is the determined cDNA sequence for contig 44.

[0179] SEQ ID NO: 141 is the determined cDNA sequence for contig 45.

[0180] SEQ ID NO: 142 is the determined cDNA sequence for contig 47.

[0181] SEQ ID NO: 143 is the determined cDNA sequence for contig 48.

[0182] SEQ ID NO: 144 is the determined cDNA sequence for contig 49.

[0183] SEQ ID NO: 145 is the determined cDNA sequence for contig 50.

[0184] SEQ ID NO: 146 is the determined cDNA sequence for contig 53.

[0185] SEQ ID NO: 147 is the determined cDNA sequence for contig 54.

[0186] SEQ ID NO: 148 is the determined cDNA sequence for contig 56.

[0187] SEQ ID NO: 149 is the determined cDNA sequence for contig 57.

[0188] SEQ ID NO: 150 is the determined cDNA sequence for contig 58.

[0189] SEQ ID NO: 151 is the full-length cDNA sequence for L530S.

[0190] SEQ ID NO: 152 is the amino acid sequence encoded by SEQ ID NO: 151

[0191] SEQ ID NO: 153 is the full-length cDNA sequence of a first variant of L514S

[0192] SEQ ID NO: 154 is the full-length cDNA sequence of a second variant of L514S

[0193] SEQ ID NO: 155 is the amino acid sequence encoded by SEQ ID NO: 153.

[0194] SEQ ID NO: 156 is the amino acid sequence encoded by SEQ ID NO: 154.

[0195] SEQ ID NO: 157 is the determined cDNA sequence for contig 59.

[0196] SEQ ID NO: 158 is the full-length cDNA sequence for L763P (also referred to as contig 22).

[0197] SEQ ID NO: 159 is the amino acid sequence encoded by SEQ ID NO: 158.

[0198] SEQ ID NO: 160 is the full-length cDNA sequence for L762P (also referred to as contig 17).

[0199] SEQ ID NO: 161 is the amino acid sequence encoded by SEQ ID NO: 160.

[0200] SEQ ID NO: 162 is the determined cDNA sequence for L515S.

[0201] SEQ ID NO: 163 is the full-length cDNA sequence of a first variant of L524S.

[0202] SEQ ID NO: 164 is the full-length cDNA sequence of a second variant of L524S.

[0203] SEQ ID NO: 165 is the amino acid sequence encoded by SEQ ID NO: 163.

[0204] SEQ ID NO: 166 is the amino acid sequence encoded by SEQ ID NO: 164.

[0205] SEQ ID NO: 167 is the full-length cDNA sequence of a first variant of L762P.

[0206] SEQ ID NO: 168 is the full-length cDNA sequence of a second variant of L762P.

[0207] SEQ ID NO: 169 is the amino acid sequence encoded by SEQ ID NO: 167.

[0208] SEQ ID NO: 170 is the amino acid sequence encoded by SEQ ID NO: 168.

[0209] SEQ ID NO: 171 is the full-length cDNA sequence for L773P (also referred to as contig 56).

[0210] SEQ ID NO: 172 is the amino acid sequence encoded by SEQ ID NO: 171.

[0211] SEQ ID NO: 173 is an extended cDNA sequence for L519S.

[0212] SEQ ID NO: 174 is the amino acid sequence encoded by SEQ ID NO: 174.

[0213] SEQ ID NO: 175 is the full-length cDNA sequence for L523S.

[0214] SEQ ID NO: 176 is the amino acid sequence encoded by SEQ ID NO: 175.

[0215] SEQ ID NO: 177 is the determined cDNA sequence for LST-sub5-7A.

[0216] SEQ ID NO: 178 is the determined cDNA sequence for LST-sub5-8G.

[0217] SEQ ID NO: 179 is the determined cDNA sequence for LST-sub5-8H.

[0218] SEQ ID NO: 180 is the determined cDNA sequence for LST-sub5-10B.

[0219] SEQ ID NO: 181 is the determined cDNA sequence for LST-sub5-10H.

[0220] SEQ ID NO: 182 is the determined cDNA sequence for LST-sub5-12B.

[0221] SEQ ID NO: 183 is the determined cDNA sequence for LST-sub5-11C.

[0222] SEQ ID NO: 184 is the determined cDNA sequence for LST-sub6-1c.

[0223] SEQ ID NO: 185 is the determined cDNA sequence for LST-sub6-2f.

[0224] SEQ ID NO: 186 is the determined cDNA sequence for LST-sub6-2G.

[0225] SEQ ID NO: 187 is the determined cDNA sequence for LST-sub6-4d.

[0226] SEQ ID NO: 188 is the determined cDNA sequence for LST-sub6-4e.

[0227] SEQ ID NO: 189 is the determined cDNA sequence for LST-sub6-4f.

[0228] SEQ ID NO: 190 is the determined cDNA sequence for LST-sub6-3h.

[0229] SEQ ID NO: 191 is the determined cDNA sequence for LST-sub6-5d.

[0230] SEQ ID NO: 192 is the determined cDNA sequence for LST-sub6-5h.

[0231] SEQ ID NO: 193 is the determined cDNA sequence for LST-sub6-6h.

[0232] SEQ ID NO: 194 is the determined cDNA sequence for LST-sub6-7a.

[0233] SEQ ID NO: 195 is the determined cDNA sequence for LST-sub6-8a.

[0234] SEQ ID NO: 196 is the determined cDNA sequence for LST-sub6-7d.

[0235] SEQ ID NO: 197 is the determined cDNA sequence for LST-sub6-7e.

[0236] SEQ ID NO: 198 is the determined cDNA sequence for LST-sub6-8e.

[0237] SEQ ID NO: 199 is the determined cDNA sequence for LST-sub6-7g.

[0238] SEQ ID NO: 200 is the determined cDNA sequence for LST-sub6-9f.

[0239] SEQ ID NO: 201 is the determined cDNA sequence for LST-sub6-9h.

[0240] SEQ ID NO: 202 is the determined cDNA sequence for LST-sub6-1b.

[0241] SEQ ID NO: 203 is the determined cDNA sequence for LST-sub6-11c.

[0242] SEQ ID NO: 204 is the determined cDNA sequence for LST-sub6-12c.

[0243] SEQ ID NO: 205 is the determined cDNA sequence for LST-sub6-12e.

[0244] SEQ ID NO: 206 is the determined cDNA sequence for LST-sub6-12f.

[0245] SEQ ID NO: 207 is the determined cDNA sequence for LST-sub6-11g.

[0246] SEQ ID NO: 208 is the determined cDNA sequence for LST-sub6-12g.

[0247] SEQ ID NO: 209 is the determined cDNA sequence for LST-sub6-12h.

[0248] SEQ ID NO: 210 is the determined cDNA sequence for LST-sub6-II-1a.

[0249] SEQ ID NO: 211 is the determined cDNA sequence for LST-sub6-II-2b.

[0250] SEQ ID NO: 212 is the determined cDNA sequence for LST-sub6-II-2g.

[0251] SEQ ID NO: 213 is the determined cDNA sequence for LST-sub6-II-1h.

[0252] SEQ ID NO: 214 is the determined cDNA sequence for LST-sub6-II-4a.

[0253] SEQ ID NO: 215 is the determined cDNA sequence for LST-sub6-II-4b.

[0254] SEQ ID NO: 216 is the determined cDNA sequence for LST-sub6-II-3e.

[0255] SEQ ID NO: 217 is the determined cDNA sequence for LST-sub6-II-4f.

[0256] SEQ ID NO: 218 is the determined cDNA sequence for LST-sub6-II-4g.

[0257] SEQ ID NO: 219 is the determined cDNA sequence for LST-sub6-II-4h.

[0258] SEQ ID NO: 220 is the determined cDNA sequence for LST-sub6-II-4c.

[0259] SEQ ID NO: 221 is the determined cDNA sequence for LST-sub6-II-5e.

[0260] SEQ ID NO: 222 is the determined cDNA sequence for LST-sub6-II-6f.

[0261] SEQ ID NO: 223 is the determined cDNA sequence for LST-sub6-II-5g.

[0262] SEQ ID NO: 224 is the determined cDNA sequence for LST-sub6-II-6g.

[0263] SEQ ID NO: 225 is the amino acid sequence for L528S.

[0264] SEQ ID NO: 226-251 are synthetic peptides derived from L762P.

[0265] SEQ ID NO: 252 is the expressed amino acid sequence of L514S.

[0266] SEQ ID NO: 253 is the DNA sequence corresponding to SEQ ID NO: 252.

[0267] SEQ ID NO: 254 is the DNA sequence of a L762P expression construct.

[0268] SEQ ID NO: 255 is the determined cDNA sequence for clone 23785.

[0269] SEQ ID NO: 256 is the determined cDNA sequence for clone 23786.

[0270] SEQ ID NO: 257 is the determined cDNA sequence for clone 23788.

[0271] SEQ ID NO: 258 is the determined cDNA sequence for clone 23790.

[0272] SEQ ID NO: 259 is the determined cDNA sequence for clone 23793.

[0273] SEQ ID NO: 260 is the determined cDNA sequence for clone 23794.

[0274] SEQ ID NO: 261 is the determined cDNA sequence for clone 23795.

[0275] SEQ ID NO: 262 is the determined cDNA sequence for clone 23796.

[0276] SEQ ID NO: 263 is the determined cDNA sequence for clone 23797.

[0277] SEQ ID NO: 264 is the determined cDNA sequence for clone 23798.

[0278] SEQ ID NO: 265 is the determined cDNA sequence for clone 23799.

[0279] SEQ ID NO: 266 is the determined cDNA sequence for clone 23800.

[0280] SEQ ID NO: 267 is the determined cDNA sequence for clone 23802.

[0281] SEQ ID NO: 268 is the determined cDNA sequence for clone 23803.

[0282] SEQ ID NO: 269 is the determined cDNA sequence for clone 23804.

[0283] SEQ ID NO: 270 is the determined cDNA sequence for clone 23805.

[0284] SEQ ID NO: 271 is the determined cDNA sequence for clone 23806.

[0285] SEQ ID NO: 272 is the determined cDNA sequence for clone 23807.

[0286] SEQ ID NO: 273 is the determined cDNA sequence for clone 23808.

[0287] SEQ ID NO: 274 is the determined cDNA sequence for clone 23809.

[0288] SEQ ID NO: 275 is the determined cDNA sequence for clone 23810.

[0289] SEQ ID NO: 276 is the determined cDNA sequence for clone 23811.

[0290] SEQ ID NO: 277 is the determined cDNA sequence for clone 23812.

[0291] SEQ ID NO: 278 is the determined cDNA sequence for clone 23813.

[0292] SEQ ID NO: 279 is the determined cDNA sequence for clone 23815.

[0293] SEQ ID NO: 280 is the determined cDNA sequence for clone 25298.

[0294] SEQ ID NO: 281 is the determined cDNA sequence for clone 25299.

[0295] SEQ ID NO: 282 is the determined cDNA sequence for clone 25300.

[0296] SEQ ID NO: 283 is the determined cDNA sequence for clone 25301

[0297] SEQ ID NO: 284 is the determined cDNA sequence for clone 25304

[0298] SEQ ID NO: 285 is the determined cDNA sequence for clone 25309.

[0299] SEQ ID NO: 286 is the determined cDNA sequence for clone 25312.

[0300] SEQ ID NO:287 is the determined cDNA sequence for clone 25317.

[0301] SEQ ID NO:288 is the determined cDNA sequence for clone 25321.

[0302] SEQ ID NO:289 is the determined cDNA sequence for clone 25323.

[0303] SEQ ID NO:290 is the determined cDNA sequence for clone 25327.

[0304] SEQ ID NO:291 is the determined cDNA sequence for clone 25328.

[0305] SEQ ID NO:292 is the determined cDNA sequence for clone 25332.

[0306] SEQ ID NO:293 is the determined cDNA sequence for clone 25333.

[0307] SEQ ID NO:294 is the determined cDNA sequence for clone 25336.

[0308] SEQ ID NO:295 is the determined cDNA sequence for clone 25340.

[0309] SEQ ID NO:296 is the determined cDNA sequence for clone 25342.

[0310] SEQ ID NO:297 is the determined cDNA sequence for clone 25356.

[0311] SEQ ID NO:298 is the determined cDNA sequence for clone 25357.

[0312] SEQ ID NO:299 is the determined cDNA sequence for clone 25361.

[0313] SEQ ID NO:300 is the determined cDNA sequence for clone 25363.

[0314] SEQ ID NO:301 is the determined cDNA sequence for clone 25397.

[0315] SEQ ID NO:302 is the determined cDNA sequence for clone 25402.

[0316] SEQ ID NO:303 is the determined cDNA sequence for clone 25403.

[0317] SEQ ID NO:304 is the determined cDNA sequence for clone 25405.

[0318] SEQ ID NO:305 is the determined cDNA sequence for clone 25407.

[0319] SEQ ID NO:306 is the determined cDNA sequence for clone 25409.

[0320] SEQ ID NO:307 is the determined cDNA sequence for clone 25396.

[0321] SEQ ID NO:308 is the determined cDNA sequence for clone 25414.

[0322] SEQ ID NO:309 is the determined cDNA sequence for clone 25410.

[0323] SEQ ID NO:310 is the determined cDNA sequence for clone 25406.

[0324] SEQ ID NO:311 is the determined cDNA sequence for clone 25306.

[0325] SEQ ID NO:312 is the determined cDNA sequence for clone 25362.

[0326] SEQ ID NO:313 is the determined cDNA sequence for clone 25360.

[0327] SEQ ID NO:314 is the determined cDNA sequence for clone 25398.

[0328] SEQ ID NO:315 is the determined cDNA sequence for clone 25355.

[0329] SEQ ID NO:316 is the determined cDNA sequence for clone 25351.

[0330] SEQ ID NO:317 is the determined cDNA sequence for clone 25331.

[0331] SEQ ID NO:318 is the determined cDNA sequence for clone 25338.

[0332] SEQ ID NO:319 is the determined cDNA sequence for clone 25335.

[0333] SEQ ID NO:320 is the determined cDNA sequence for clone 25329.

[0334] SEQ ID NO:321 is the determined cDNA sequence for clone 25324.

[0335] SEQ ID NO:322 is the determined cDNA sequence for clone 25322.

[0336] SEQ ID NO:323 is the determined cDNA sequence for clone 25319.

[0337] SEQ ID NO:324 is the determined cDNA sequence for clone 25316.

[0338] SEQ ID NO:325 is the determined cDNA sequence for clone 25311.

[0339] SEQ ID NO:326 is the determined cDNA sequence for clone 25310.

[0340] SEQ ID NO:327 is the determined cDNA sequence for clone 25302.

[0341] SEQ ID NO:328 is the determined cDNA sequence for clone 25315.

[0342] SEQ ID NO:329 is the determined cDNA sequence for clone 25308.

[0343] SEQ ID NO:330 is the determined cDNA sequence for clone 25303.

[0344] SEQ ID NO:331-337 are the cDNA sequences of isoforms of the p53 tumor suppressor homologue, p63 (also referred to as L530S).

[0345] SEQ ID NO:338-344 are the amino acid sequences encoded by SEQ ID NO:331-337, respectively

[0346] SEQ ID NO:345 is a second cDNA sequence for the antigen L763P.

[0347] SEQ ID NO:346 is the amino acid sequence encoded by the sequence of SEQ ID NO:345.

[0348] SEQ ID NO:347 is a determined full-length cDNA sequence for L523S.

[0349] SEQ ID NO:348 is the amino acid sequence encoded by SEQ ID NO:347.

[0350] SEQ ID NO:349 is the cDNA sequence encoding the N-terminal portion of L773P.

[0351] SEQ ID NO:350 is the amino acid sequence of the N-terminal portion of L773P.

[0352] SEQ ID NO:351 is the DNA sequence for a fusion of Ra12 and the N-terminal portion of L763P.

[0353] SEQ ID NO:352 is the amino acid sequence of the fusion of Ra12 and the N-terminal portion of L763P.

[0354] SEQ ID NO:353 is the DNA sequence for a fusion of Ra12 and the C-terminal portion of L763P.

[0355] SEQ ID NO:354 is the amino acid sequence of the fusion of Ra12 and the C-terminal portion of L763P.

[0356] SEQ ID NO:355 is a primer.

[0357] SEQ ID NO:356 is a primer.

[0358] SEQ ID NO:357 is the protein sequence of expressed recombinant L762P.

[0359] SEQ ID NO:358 is the DNA sequence of expressed recombinant L762P.

[0360] SEQ ID NO:359 is a primer.

[0361] SEQ ID NO:360 is a primer.

[0362] SEQ ID NO:361 is the protein sequence of expressed recombinant L773P A.

[0363] SEQ ID NO:362 is the DNA sequence of expressed recombinant L773P A.

[0364] SEQ ID NO:363 is an epitope derived from clone L773P polypeptide.

[0365] SEQ ID NO:364 is a polynucleotide encoding the polypeptide of SEQ ID NO:363.

[0366] SEQ ID NO:365 is an epitope derived from clone L773P polypeptide.

[0367] SEQ ID NO:366 is a polynucleotide encoding the polypeptide of SEQ ID NO:365.

[0368] SEQ ID NO:367 is an epitope consisting of amino acids 571-590 of SEQ ID NO:161, clone L762P.

[0369] SEQ ID NO:368 is the full-length DNA sequence for contig 13 (SEQ ID NO:125), also referred to as L761P.

[0370] SEQ ID NO:369 is the protein sequence encoded by the DNA sequence of SEQ ID NO:368.

[0371] SEQ ID NO:370 is an L762P DNA sequence from nucleotides 2071-2130.

[0372] SEQ ID NO:371 is an L762P DNA sequence from nucleotides 1441-1500.

[0373] SEQ ID NO:372 is an L762P DNA sequence from nucleotides 1936-1955.

[0374] SEQ ID NO:373 is an L762P DNA sequence from nucleotides 2620-2679.

[0375] SEQ ID NO:374 is an L762P DNA sequence from nucleotides 1801-1860.

[0376] SEQ ID NO:375 is an L762P DNA sequence from nucleotides 1531-1591.

[0377] SEQ ID NO:376 is the amino acid sequence of the L762P peptide encoded by SEQ ID NO:373.

[0378] SEQ ID NO:377 is the amino acid sequence of the L762P peptide encoded by SEQ ID NO:370.

[0379] SEQ ID NO:378 is the amino acid sequence of the L762P peptide encoded by SEQ ID NO:372.

[0380] SEQ ID NO:379 is the amino acid sequence of the L762P peptide encoded by SEQ ID NO:374.

[0381] SEQ ID NO:380 is the amino acid sequence of the L762P peptide encoded by SEQ ID NO:371.

[0382] SEQ ID NO:381 is the amino acid sequence of the L762P peptide encoded by SEQ ID NO:375.

[0383] SEQ ID NO:382 is the amino acid sequence of an epitope of L762P.

[0384] SEQ ID NO:383-386 are PCR primers.

[0385] SEQ ID NO:387-395 are the amino acid sequences of L773P peptides.

[0386] SEQ ID NO:396-419 are the amino acid sequences of L523S peptides.

[0387] SEQ ID NO:420 is the determined cDNA sequence for clone #19014.

[0388] SEQ ID NO:421 is the forward primer PDM-278 for the L514S-13160 coding region.

[0389] SEQ ID NO:422 is the reverse primer PDM-278 for the L514S-13160 coding region.

[0390] SEQ ID NO:423 is the amino acid sequence for the expressed recombinant L514S.

[0391] SEQ ID NO:424 is the DNA coding sequence for the recombinant L514S.

[0392] SEQ ID NO:425 is the forward primer PDM-414 for the L523S coding region.

[0393] SEQ ID NO:426 is the reverse primer PDM-414 for the L523S coding region.

[0394] SEQ ID NO:427 is the amino acid sequence for the expressed recombinant L523S.

[0395] SEQ ID NO:428 is the DNA coding sequence for the recombinant L523S.

[0396] SEQ ID NO:429 is the reverse primer PDM-279 for the L762PA coding region.

[0397] SEQ ID NO:430 is the amino acid sequence for the expressed recombinant L762PA.

[0398] SEQ ID NO:431 is the DNA coding sequence for the recombinant L762PA.

[0399] SEQ ID NO:432 is the reverse primer PDM-300 for the L773P coding region.

[0400] SEQ ID NO:433 is the amino acid sequence of the expressed recombinant L773P.

[0401] SEQ ID NO:434 is the DNA coding sequence for the recombinant L773P.

[0402] SEQ ID NO:435 is the forward primer for TCR Valpha8.

[0403] SEQ ID NO:436 is the reverse primer for TCR Valpha8.

[0404] SEQ ID NO:437 is the forward primer for TCR Vbeta8.

[0405] SEQ ID NO:438 is the reverse primer for TCR Vbeta8.

[0406] SEQ ID NO:439 is the TCR Valpha DNA sequence of the TCR clone specific for the lung antigen L762P.

[0407] SEQ ID NO:440 is the TCR Vbeta DNA sequence of the TCR clone specific for the lung antigen L762P.

[0408] SEQ ID NO:441 is the amino acid sequence of L763 peptide #2684.

[0409] SEQ ID NO:442 is the predicted full-length cDNA for the cloned partial sequence of clone L529S (SEQ ID NO:106).

[0410] SEQ ID NO:443 is the deduced amino acid sequence encoded by SEQ ID NO:442.

[0411] SEQ ID NO:444 is the forward primer PDM-734 for the coding region of clone L523S.

[0412] SEQ ID NO:445 is the reverse primer PDM-735 for the coding region of clone L523S.

[0413] SEQ ID NO:446 is the amino acid sequence for the expressed recombinant L523S.

[0414] SEQ ID NO:447 is the DNA coding sequence for the recombinant L523S.

[0415] SEQ ID NO:448 is another forward primer PDM-733 for the coding region of clone L523S.

[0416] SEQ ID NO:449 is the amino acid sequence for a second expressed recombinant L523S.

[0417] SEQ ID NO:450 is the DNA coding sequence for a second recombinant L523S.

[0418] SEQ ID NO:451 corresponds to amino acids 86-110, an epitope of L514S-specific in the generation of antibodies.

[0419] SEQ ID NO:452 corresponds to amino acids 21-45, an epitope of L514S-specific in the generation of antibodies.

[0420] SEQ ID NO:453 corresponds to amino acids 121-135, an epitope of L514S-specific in the generation of antibodies.

[0421] SEQ ID NO:454 corresponds to amino acids 440-460, an epitope of L523S-specific in the generation of antibodies.

[0422] SEQ ID NO:455 corresponds to amino acids 156-175, an epitope of L523S-specific in the generation of antibodies.

[0423] SEQ ID NO:456 corresponds to amino acids 326-345, an epitope of L523S-specific in the generation of antibodies.

[0424] SEQ ID NO:457 corresponds to amino acids 40-59, an epitope of L523S-specific in the generation of antibodies.

[0425] SEQ ID NO:458 corresponds to amino acids 80-99, an epitope of L523S-specific in the generation of antibodies.

[0426] SEQ ID NO:459 corresponds to amino acids 160-179, an epitope of L523S-specific in the generation of antibodies.

[0427] SEQ ID NO:460 corresponds to amino acids 180-199, an epitope of L523S-specific in the generation of antibodies.

[0428] SEQ ID NO:461 corresponds to amino acids 320-339, an epitope of L523S-specific in the generation of antibodies.

[0429] SEQ ID NO:462 corresponds to amino acids 340-359, an epitope of L523S-specific in the generation of antibodies.

[0430] SEQ ID NO:463 corresponds to amino acids 370-389, an epitope of L523S-specific in the generation of antibodies.

[0431] SEQ ID NO:464 corresponds to amino acids 380-399, an epitope of L523S-specific in the generation of antibodies.

[0432] SEQ ID NO:465 corresponds to amino acids 37-55, an epitope of L523S-recognized by the L523S-specific CTL line 6B1.

[0433] SEQ ID NO:466 corresponds to amino acids 41-51, the mapped antigenic epitope of L523S-recognized by the L523S-specific CTL line 6B1.

[0434] SEQ ID NO:467 corresponds to the DNA sequence which encodes SEQ ID NO:466.

[0435] SEQ ID NO:468 corresponds to the amino acids of peptide 16, 17 of hL523S.

[0436] SEQ ID NO:469 corresponds to the amino acids of peptide 16, 17 of mL523S.

[0437] SEQ ID NO:470 corresponds to the amino acids of the 20-mer peptide #4 of L523S.

[0438] SEQ ID NO:471 corresponds to the amino acids of the overlapping 20-mer peptides #14-#19 of L523S.

[0439] SEQ ID NO:472 corresponds to the amino acids of the overlapping 20-mer peptides #20-#25 of L523S.

[0440] SEQ ID NO:473 corresponds to the amino acids of the overlapping 20-mer peptides #26-190 30.5 of L523S.

[0441] SEQ ID NO:474 corresponds to the amino acids of the overlapping 20-mer peptides #31-#36 of L523S.

[0442] SEQ ID NO:475 corresponds to the amino acids of the overlapping 20-mer peptides #37-#40.5 of L523S.

[0443] SEQ ID NO:476 corresponds to the amino acids of the overlapping 20-mer peptides #41-#46.5 of L523S.

[0444] SEQ ID NO:477 corresponds to the amino acids of the overlapping 20-mer peptides #47-#53 of L523S.

[0445] SEQ ID NO:478 is the cDNA encoding the full length ORF of L523S.

[0446] SEQ ID NO:479 is the cDNA sequence of Adenovirus-L523s, an Adenovirus vector containing the cDNA encoding the full-length ORF of L523S.

[0447] SEQ ID NO:480 is the amino acid sequence of the full-length L523S protein as expressed from the Adenovirus vector set forth in SEQ ID NO:479.

[0448] SEQ ID NO:481 is amino acids 9-27 of L523S containing a CD8 T cell epitope as described in example 37.

[0449] SEQ ID NO:482 is amino acids 33-75 of L523S containing a CD4 T cell epitope as described in example 37.

[0450] SEQ ID NO:483 is the determined cDNA sequence for the Rhesus macaque L523S homologue.

[0451] SEQ ID NO:484 is the predicted amino acid sequence for the Rhesus macaque L523S homologue, encoded by the polynucleotide sequence set forth in SEQ ID NO:483.

### DETAILED DESCRIPTION OF THE INVENTION

[0452] U.S. patents, U.S. patent application publications, U.S. patent applications, foreign patents, foreign patent applications and non-patent publications referred to in this specification and/or listed in the Application Data Sheet, are incorporated herein by reference, in their entirety.

[0453] The present invention is directed generally to compositions and their use in the therapy and diagnosis of cancer, particularly lung cancer. As described further below, illustrative compositions of the present invention include, but are not restricted to, polypeptides, particularly immunogenic polypeptides, polynucleotides encoding such polypeptides, antibodies and other binding agents, antigen presenting cells (APCs) and immune system cells (e.g., T cells).

[0454] The practice of the present invention will employ, unless indicated specifically to the contrary, conventional methods of virology, immunology, microbiology, molecular biology and recombinant DNA techniques within the skill of the art, many of which are described below for the purpose of illustration. Such techniques are explained fully in the literature. See, e.g., Sambrook, et al. Molecular Cloning: A Laboratory Manual (2nd Edition, 1989); Maniatis et al. Molecular Cloning: A Laboratory Manual (1982); DNA Cloning: A Practical Approach, vol. I & II (D. Glover, ed.); Oligonucleotide Synthesis (N. Gait, ed., 1984); Nucleic Acid Hybridization (B. Hames & S. Higgins, eds., 1985); Transcription and Translation (B. Hames & S. Higgins, eds., 1984); Animal Cell Culture (R. Freshney, ed., 1986); Perbal, A Practical Guide to Molecular Cloning (1984).

[0455] All publications, patents and patent applications cited herein, whether supra or infra, are hereby incorporated by reference in their entirety.

[0456] As used in this specification and the appended claims, the singular forms “a,” “an” and “the” include plural references unless the content clearly dictates otherwise.

[0457] Polypeptide Compositions

[0458] As used herein, the term “polypeptide” “is used in its conventional meaning, i.e., as a sequence of amino acids. The polypeptides are not limited to a specific length of the product; thus, peptides, oligopeptides, and proteins are included within the definition of polypeptide, and such terms may be used interchangeably herein unless specifically indicated otherwise. This term also does not refer to or exclude post-expression modifications of the polypeptide, for example, glycosylations, acetylations, phosphorylations and the like, as well as other modifications known in the art, both naturally occurring and non-naturally occurring. A polypeptide may be an entire protein, or a subsequence thereof. Particular polypeptides of interest in the context of this invention are amino acid subsequences comprising epitopes, i.e., antigenic determinants substantially responsible for the immunogenic properties of a polypeptide and being capable of evoking an immune response.

[0459] Particularly illustrative polypeptides of the present invention comprise those encoded by a polynucleotide sequence set forth in any one of SEQ ID NO:1-3,6-8, 10-13, 15-27, 29, 30, 32, 34-49, 51, 52, 54, 55, 57-59, 61-69, 71, 73, 74, 77, 78, 80-82, 84, 86-96, 107-109, 111, 113, 125, 127, 128, 129, 131-133, 142, 144, 148-151, 153, 154, 157, 158, 160, 167, 168, 171, 179, 182, 184-186, 188-191, 193, 194, 198-207, 209, 210, 213, 214, 217, 220-224, 253-337, 345, 347, 349, 358, 362, 364, 365, 368, 370-375, 420, 424, 428, 431, 434, 442, 447, 450, 467, 478, 479 and 483, or a sequence that hybridizes under moderately stringent conditions, or, alternatively, under highly stringent conditions, to a polynucleotide sequence set forth in any one of SEQ ID NO:1-3,6-8, 10-13, 15-27, 29, 30, 32, 34-49, 51, 52, 54, 55, 57-59, 61-69, 71, 73, 74, 77, 78, 80-82, 84, 86-96, 107-109, 111, 113, 125, 127, 128, 129, 131-133, 142, 144, 148-151, 153, 154, 157, 158, 160, 167, 168, 171, 179, 182, 184-186, 188-191, 193, 194, 198-207, 209, 210, 213, 214, 217, 220-224, 253-337, 345, 347, 349, 358, 362, 364, 365, 368, 370-375, 420, 424, 428, 431, 434, 442, 447, 450, 467, 478, 479 and 483. Certain illustrative polypeptides of the invention comprise amino acid sequences as set forth in any one of SEQ ID NO:152, 155, 156, 165, 166, 169, 170, 172, 174, 176, 226-252, 338-344, 346, 350, 357, 361, 363, 365, 367, 369, 376-382, 387-419, 423, 427, 430, 433, 441, 443, 446, 449, 451-466, 468-477, 480-482, and 484.

[0460] The polypeptides of the present invention are sometimes herein referred to as lung tumor proteins or lung tumor polypeptides, as an indication that their identification has been based at least in part upon their increased levels of expression in lung tumor samples. Thus, a “lung tumor polypeptide” or “lung tumor protein,” refers generally to a polypeptide sequence of the present invention, or a polynucleotide sequence encoding such a polypeptide, that is expressed in a substantial proportion of lung tumor samples, for example preferably greater than about 20%, more preferably greater than about 30%, and most preferably greater than about 50% or more of lung tumor samples tested, at a level that is at least two fold, and preferably at least five fold, greater than the level of expression in normal tissues, as determined using a representative assay provided herein. A lung tumor polypeptide sequence of the invention, based upon its increased level of expression in tumor cells, has particular utility both as a diagnostic marker as well as a therapeutic target, as further described below.

[0461] In certain preferred embodiments, the polypeptides of the invention are immunogenic, i.e., they react detectably within an immunoassay (such as an ELISA or T-cell stimulation assay) with antisera and/or T-cells from a patient with lung cancer. Screening for immunogenic activity can be performed using techniques well known to the skilled artisan. For example, such screens can be performed using methods such as those described in Harlow and Lane, Antibodies: A Laboratory Manual, Cold Spring Harbor Laboratory, 1988. In one illustrative example, a polypeptide may be immobilized on a solid support and contacted with patient sera to allow binding of antibodies within the sera to the immobilized polypeptide. Unbound sera may then be removed and bound antibodies detected using, for example, ¹²⁵I-labeled Protein A.

[0462] As would be recognized by the skilled artisan, immunogenic portions of the polypeptides disclosed herein are also encompassed by the present invention. An “immunogenic portion,” as used herein, is a fragment of an immunogenic polypeptide of the invention that itself is immunologically reactive (i.e., specifically binds) with the B-cells and/or T-cell surface antigen receptors that recognize the polypeptide. Immunogenic portions may generally be identified using well known techniques, such as those summarized in Paul, Fundamental Immunology, 3rd ed., 243-247 (Raven Press, 1993) and references cited therein. Such techniques include screening polypeptides for the ability to react with antigen-specific antibodies, antisera and/or T-cell lines or clones. As used herein, antisera and antibodies are “antigen-specific” if they specifically bind to an antigen (i.e., they react with the protein in an ELISA or other immunoassay, and do not react detectably with unrelated proteins). Such antisera and antibodies may be prepared as described herein, and using well-known techniques.

[0463] In one preferred embodiment, an immunogenic portion of a polypeptide of the present invention is a portion that reacts with antisera and/or T-cells at a level that is not substantially less than the reactivity of the full-length polypeptide (e.g., in an ELISA and/or T-cell reactivity assay). Preferably, the level of immunogenic activity of the immunogenic portion is at least about 50%, preferably at least about 70% and most preferably greater than about 90% of the immunogenicity for the full-length polypeptide. In some instances, preferred immunogenic portions will be identified that have a level of immunogenic activity greater than that of the corresponding full-length polypeptide, e.g., having greater than about 100% or 150% or more immunogenic activity.

[0464] In certain other embodiments, illustrative immunogenic portions may include peptides in which an N-terminal leader sequence and/or transmembrane domain have been deleted. Other illustrative immunogenic portions will contain a small N- and/or C-terminal deletion (e.g., 1-30 amino acids, preferably 5-15 amino acids), relative to the mature protein.

[0465] In another embodiment, a polypeptide composition of the invention may also comprise one or more polypeptides that are immunologically reactive with T cells and/or antibodies generated against a polypeptide of the invention, particularly a polypeptide having an amino acid sequence disclosed herein, or to an immunogenic fragment or variant thereof.

[0466] In another embodiment of the invention, polypeptides are provided that comprise one or more polypeptides that are capable of eliciting T cells and/or antibodies that are immunologically reactive with one or more polypeptides described herein, or one or more polypeptides encoded by contiguous nucleic acid sequences contained in the polynucleotide sequences disclosed herein, or immunogenic fragments or variants thereof, or to one or more nucleic acid sequences which hybridize to one or more of these sequences under conditions of moderate to high stringency.

[0467] The present invention, in another aspect, provides polypeptide fragments comprising at least about 5, 10, 15, 20, 25, 50, or 100 contiguous amino acids, or more, including all intermediate lengths, of a polypeptide compositions set forth herein, such as those set forth in SEQ ID NO:152, 155, 156, 165, 166, 169, 170, 172, 174, 176, 226-252, 338-344, 346, 350, 357, 361, 363, 365, 367, 369, 376-382 and 387-419, 441, 443, 446, 449, 451-466, 468-477, 480-482, and 484, or those encoded by a polynucleotide sequence set forth in a sequence of SEQ ID NO:1-3,6-8, 10-13, 15-27, 29, 30, 32, 34-49, 51, 52, 54, 55, 57-59, 61-69, 71, 73, 74, 77, 78, 80-82, 84, 86-96, 107-109, 111, 113, 125, 127, 128, 129, 131-133, 142, 144, 148-151, 153, 154, 157, 158, 160, 167, 168, 171, 179, 182, 184-186, 188-191, 193, 194, 198-207, 209, 210, 213, 214, 217, 220-224, 253-337, 345, 347, 349, 358, 362, 364, 365, 368, 370-375, 420, 424, 428, 431, 434, 442, 447, 450, 467, 478, 479 and 483.

[0468] In another aspect, the present invention provides variants of the polypeptide compositions described herein. Polypeptide variants generally encompassed by the present invention will typically exhibit at least about 70%, 75%, 80%, 85%, 90%, 91%, 92%, 93%, 94%, 95%, 96%, 97%, 98%, or 99% or more identity (determined as described below), along its length, to a polypeptide sequences set forth herein.

[0469] In one preferred embodiment, the polypeptide fragments and variants provide by the present invention are immunologically reactive with an antibody and/or T-cell that reacts with a full-length polypeptide specifically set for the herein.

[0470] In another preferred embodiment, the polypeptide fragments and variants provided by the present invention exhibit a level of immunogenic activity of at least about 50%, preferably at least about 70%, and most preferably at least about 90% or more of that exhibited by a full-length polypeptide sequence specifically set forth herein.

[0471] A polypeptide “variant,” as the term is used herein, is a polypeptide that typically differs from a polypeptide specifically disclosed herein in one or more substitutions, deletions, additions and/or insertions. Such variants may be naturally occurring or may be synthetically generated, for example, by modifying one or more of the above polypeptide sequences of the invention and evaluating their immunogenic activity as described herein and/or using any of a number of techniques well known in the art.

[0472] For example, certain illustrative variants of the polypeptides of the invention include those in which one or more portions, such as an N-terminal leader sequence or transmembrane domain, have been removed. Other illustrative variants include variants in which a small portion (e.g., 1-30 amino acids, preferably 5-15 amino acids) has been removed from the N- and/or C-terminal of the mature protein.

[0473] In many instances, a variant will contain conservative substitutions. A “conservative substitution” is one in which an amino acid is substituted for another amino acid that has similar properties, such that one skilled in the art of peptide chemistry would expect the secondary structure and hydropathic nature of the polypeptide to be substantially unchanged. As described above, modifications may be made in the structure of the polynucleotides and polypeptides of the present invention and still obtain a functional molecule that encodes a variant or derivative polypeptide with desirable characteristics, e.g., with immunogenic characteristics. When it is desired to alter the amino acid sequence of a polypeptide to create an equivalent, or even an improved, immunogenic variant or portion of a polypeptide of the invention, one skilled in the art will typically change one or more of the codons of the encoding DNA sequence according to Table 1.

[0474] For example, certain amino acids may be substituted for other amino acids in a protein structure without appreciable loss of interactive binding capacity with structures such as, for example, antigen-binding regions of antibodies or binding sites on substrate molecules. Since it is the interactive capacity and nature of a protein that defines that protein's biological functional activity, certain amino acid sequence substitutions can be made in a protein sequence, and, of course, its underlying DNA coding sequence, and nevertheless obtain a protein with like properties. It is thus contemplated that various changes may be made in the peptide sequences of the disclosed compositions, or corresponding DNA sequences which encode said peptides without appreciable loss of their biological utility or activity.

TABLE 1

| Amino Acids | | | Codons |
|---|---|---|---|
| Alanine | Ala | A | GCA GCC GCG GCU |
| Cysteine | Cys | C | UGC UGU |
| Aspartic acid | Asp | D | GAC GAU |
| Glutamic acid | Glu | E | GAA GAG |
| Phenylalanine | Phe | F | UUC UUU |
| Glycine | Gly | G | GGA GGC GGG GGU |
| Histidine | His | H | CAC CAU |
| Isoleucine | Ile | I | AUA AUC AUU |
| Lysine | Lys | K | AAA AAG |
| Leucine | Leu | L | UUA UUG CUA CUC CUG CUU |
| Methionine | Met | M | AUG |
| Asparagine | Asn | N | AAC AAU |
| Proline | Pro | P | CCA CCC CCC CCU |
| Glutamine | Gln | Q | CAA CAG |
| Arginine | Arg | R | AGA AGG CGA CGC CGG CGU |
| Serine | Ser | S | AGC AGU UCA UCC UCG UCU |
| Threonine | Thr | T | ACA ACC ACG ACU |
| Valine | Val | V | GUA GUC GUG GUU |
| Tryptophan | Trp | W | UGG |
| Tyrosine | Tyr | Y | UAC UAU |

[0475] In making such changes, the hydropathic index of amino acids may be considered. The importance of the hydropathic amino acid index in conferring interactive biologic function on a protein is generally understood in the art (Kyte and Doolittle, 1982, incorporated herein by reference). It is accepted that the relative hydropathic character of the amino acid contributes to the secondary structure of the resultant protein, which in turn defines the interaction of the protein with other molecules, for example, enzymes, substrates, receptors, DNA, antibodies, antigens, and the like. Each amino acid has been assigned a hydropathic index on the basis of its hydrophobicity and charge characteristics (Kyte and Doolittle, 1982). These values are: isoleucine (+4.5); valine (+4.2); leucine (+3.8); phenylalanine (+2.8); cysteine/cystine (+2.5); methionine (+1.9); alanine (+1.8); glycine (−0.4); threonine (−0.7); serine (−0.8); tryptophan (−0.9); tyrosine (−1.3); proline (−1.6); histidine (−3.2); glutamate (−3.5); glutamine (−3.5); aspartate (−3.5); asparagine (−3.5); lysine (−3.9); and arginine (−4.5).

[0476] It is known in the art that certain amino acids may be substituted by other amino acids having a similar hydropathic index or score and still result in a protein with similar biological activity, i.e. still obtain a biological functionally equivalent protein. In making such changes, the substitution of amino acids whose hydropathic indices are within ±2 is preferred, those within ±1 are particularly preferred, and those within ±0.5 are even more particularly preferred. It is also understood in the art that the substitution of like amino acids can be made effectively on the basis of hydrophilicity. U.S. Pat. No. 4,554,101 (specifically incorporated herein by reference in its entirety), states that the greatest local average hydrophilicity of a protein, as governed by the hydrophilicity of its adjacent amino acids, correlates with a biological property of the protein.

[0477] As detailed in U.S. Pat. No. 4,554,101, the following hydrophilicity values have been assigned to amino acid residues: arginine (+3.0); lysine (+3.0); aspartate (+3.0±1); glutamate (+3.0±1); serine (+0.3); asparagine (+0.2); glutamine (+0.2); glycine (O); threonine (−0.4); proline (−0.5±1); alanine (−0.5); histidine (−0.5); cysteine (−1.0); methionine (−1.3); valine (−1.5); leucine (−1.8); isoleucine (−1.8); tyrosine (−2.3); phenylalanine (−2.5); tryptophan (−3.4). It is understood that an amino acid can be substituted for another having a similar hydrophilicity value and still obtain a biologically equivalent, and in particular, an immunologically equivalent protein. In such changes, the substitution of amino acids whose hydrophilicity values are within ±2 is preferred, those within ±1 are particularly preferred, and those within ±0.5 are even more particularly preferred.

[0478] As outlined above, amino acid substitutions are generally therefore based on the relative similarity of the amino acid side-chain substituents, for example, their hydrophobicity, hydrophilicity, charge, size, and the like. Exemplary substitutions that take various of the foregoing characteristics into consideration are well known to those of skill in the art and include: arginine and lysine; glutamate and aspartate; serine and threonine; glutamine and asparagine; and valine, leucine and isoleucine.

[0479] In addition, any polynucleotide may be further modified to increase stability in vivo. Possible modifications include, but are not limited to, the addition of flanking sequences at the 5′ and/or 3′ ends; the use of phosphorothioate or 2′ O-methyl rather than phosphodiesterase linkages in the backbone; and/or the inclusion of nontraditional bases such as inosine, queosine and wybutosine, as well as acetyl- methyl-, thio- and other modified forms of adenine, cytidine, guanine, thymine and uridine.

[0480] Amino acid substitutions may further be made on the basis of similarity in polarity, charge, solubility, hydrophobicity, hydrophilicity and/or the amphipathic nature of the residues. For example, negatively charged amino acids include aspartic acid and glutamic acid; positively charged amino acids include lysine and arginine; and amino acids with uncharged polar head groups having similar hydrophilicity values include leucine, isoleucine and valine; glycine and alanine; asparagine and glutamine; and serine, threonine, phenylalanine and tyrosine. Other groups of amino acids that may represent conservative changes include: (1) ala, pro, gly, glu, asp, gln, asn, ser, thr; (2) cys, ser, tyr, thr; (3) val, ile, leu, met, ala, phe; (4) lys, arg, his; and (5) phe, tyr, trp, his. A variant may also, or alternatively, contain non-conservative changes. In a preferred embodiment, variant polypeptides differ from a native sequence by substitution, deletion or addition of five amino acids or fewer. Variants may also (or alternatively) be modified by, for example, the deletion or addition of amino acids that have minimal influence on the immunogenicity, secondary structure and hydropathic nature of the polypeptide.

[0481] As noted above, polypeptides may comprise a signal (or leader) sequence at the N-terminal end of the protein, which co-translationally or post-translationally directs transfer of the protein. The polypeptide may also be conjugated to a linker or other sequence for ease of synthesis, purification or identification of the polypeptide (e.g., poly-His), or to enhance binding of the polypeptide to a solid support. For example, a polypeptide may be conjugated to an immunoglobulin Fe region.

[0482] When comparing polypeptide sequences, two sequences are said to be “identical” if the sequence of amino acids in the two sequences is the same when aligned for maximum correspondence, as described below. Comparisons between two sequences are typically performed by comparing the sequences over a comparison window to identify and compare local regions of sequence similarity. A “comparison window” as used herein, refers to a segment of at least about 20 contiguous positions, usually 30 to about 75, 40 to about 50, in which a sequence, may be compared to a reference sequence of the same number of contiguous positions after the two sequences are optimally aligned.

[0483] Optimal alignment of sequences for comparison may be conducted using the Megalign program in the Lasergene suite of bioinformatics software (DNASTAR, Inc., Madison, Wis.), using default parameters. This program embodies several alignment schemes described in the following references: Dayhoff, M. O. (1978) A model of evolutionary change in proteins—Matrices for detecting distant relationships. In Dayhoff, M. O. (ed.) Atlas of Protein Sequence and Structure, National Biomedical Research Foundation, Washington D.C. Vol. 5, Suppl. 3, pp. 345-358; Hein J. (1990) Unified Approach to Alignment and Phylogenes pp. 626-645 Methods in Enzymology vol. 183, Academic Press, Inc., San Diego, Calif.; Higgins, D. G. and Sharp, P. M. (1989) CABIOS 5:151-153; Myers, E. W. and Muller W. (1988) CABIOS 4:11-17; Robinson, E. D. (1971) Comb. Theor 11:105; Santou, N. Nes, M. (1987) Mol. Biol. Evol. 4:406-425; Sneath, P. H. A. and Sokal, R. R. (1973) Numerical Taxonomy—the Principles and Practice of Numerical Taxonomy, Freeman Press, San Francisco, Calif.; Wilbur, W. J. and Lipman, D. J. (1983) Proc. Natl. Acad., Sci. USA 80:726-730.

[0484] Alternatively, optimal alignment of sequences for comparison may be conducted by the local identity algorithm of Smith and Waterman (1981) Add. APL. Math 2:482, by the identity alignment algorithm of Needleman and Wunsch (1970) J. Mol. Biol. 48:443, by the search for similarity methods of Pearson and Lipman (1988) Proc. Natl. Acad. Sci. USA 85: 2444, by computerized implementations of these algorithms (GAP, BESTFIT, BLAST, FASTA, and TFASTA in the Wisconsin Genetics Software Package, Genetics Computer Group (GCG), 575 Science Dr., Madison, Wis.), or by inspection.

[0485] One preferred example of algorithms that are suitable for determining percent sequence identity and sequence similarity are the BLAST and BLAST 2.0 algorithms, which are described in Altschul et al. (1977) Nucl. Acids Res. 25:3389-3402 and Altschul et al. (1990) J. Mol. Biol. 215:403-410, respectively. BLAST and BLAST 2.0 can be used, for example with the parameters described herein, to determine percent sequence identity for the polynucleotides and polypeptides of the invention. Software for performing BLAST analyses is publicly available through the National Center for Biotechnology Information. For amino acid sequences, a scoring matrix can be used to calculate the cumulative score. Extension of the word hits in each direction are halted when: the cumulative alignment score falls off by the quantity X from its maximum achieved value; the cumulative score goes to zero or below, due to the accumulation of one or more negative-scoring residue alignments; or the end of either sequence is reached. The BLAST algorithm parameters W, T and X determine the sensitivity and speed of the alignment.

[0486] In one preferred approach, the “percentage of sequence identity” is determined by comparing two optimally aligned sequences over a window of comparison of at least 20 positions, wherein the portion of the polypeptide sequence in the comparison window may comprise additions or deletions (i.e., gaps) of 20 percent or less, usually 5 to 15 percent, or 10 to 12 percent, as compared to the reference sequences (which does not comprise additions or deletions) for optimal alignment of the two sequences. The percentage is calculated by determining the number of positions at which the identical amino acid residue occurs in both sequences to yield the number of matched positions, dividing the number of matched positions by the total number of positions in the reference sequence (i.e., the window size) and multiplying the results by 100 to yield the percentage of sequence identity.

[0487] Within other illustrative embodiments, a polypeptide may be a fusion polypeptide that comprises multiple polypeptides as described herein, or that comprises at least one polypeptide as described herein and an unrelated sequence, such as a known tumor protein. A fusion partner may, for example, assist in providing T helper epitopes (an immunological fusion partner), preferably T helper epitopes recognized by humans, or may assist in expressing the protein (an expression enhancer) at higher yields than the native recombinant protein. Certain preferred fusion partners are both immunological and expression enhancing fusion partners. Other fusion partners may be selected so as to increase the solubility of the polypeptide or to enable the polypeptide to be targeted to desired intracellular compartments. Still further fusion partners include affinity tags, which facilitate purification of the polypeptide.

[0488] Fusion polypeptides may generally be prepared using standard techniques, including chemical conjugation. Preferably, a fusion polypeptide is expressed as a recombinant polypeptide, allowing the production of increased levels, relative to a non-fused polypeptide, in an expression system. Briefly, DNA sequences encoding the polypeptide components may be assembled separately, and ligated into an appropriate expression vector. The 3′ end of the DNA sequence encoding one polypeptide component is ligated, with or without a peptide linker, to the 5′ end of a DNA sequence encoding the second polypeptide component so that the reading frames of the sequences are in phase. This permits translation into a single fusion polypeptide that retains the biological activity of both component polypeptides.

[0489] A peptide linker sequence may be employed to separate the first and second polypeptide components by a distance sufficient to ensure that each polypeptide folds into its secondary and tertiary structures. Such a peptide linker sequence is incorporated into the fusion polypeptide using standard techniques well known in the art. Suitable peptide linker sequences may be chosen based on the following factors: (1) their ability to adopt a flexible extended conformation; (2) their inability to adopt a secondary structure that could interact with functional epitopes on the first and second polypeptides; and (3) the lack of hydrophobic or charged residues that might react with the polypeptide functional epitopes. Preferred peptide linker sequences contain Gly, Asn and Ser residues. Other near neutral amino acids, such as Thr and Ala may also be used in the linker sequence. Amino acid sequences which may be usefully employed as linkers include those disclosed in Maratea et al., Gene 40:39-46, 1985; Murphy et al., Proc. Natl. Acad. Sci. USA 83:8258-8262, 1986; U.S. Pat. No. 4,935,233 and U.S. Pat. No. 4,751,180. The linker sequence may generally be from 1 to about 50 amino acids in length. Linker sequences are not required when the first and second polypeptides have non-essential N-terminal amino acid regions that can be used to separate the functional domains and prevent steric interference.

[0490] The ligated DNA sequences are operably linked to suitable transcriptional or translational regulatory elements. The regulatory elements responsible for expression of DNA are located only 5′ to the DNA sequence encoding the first polypeptides. Similarly, stop codons required to end translation and transcription termination signals are only present 3′ to the DNA sequence encoding the second polypeptide.

[0491] The fusion polypeptide can comprise a polypeptide as described herein together with an unrelated immunogenic protein, such as an immunogenic protein capable of eliciting a recall response. Examples of such proteins include tetanus, tuberculosis and hepatitis proteins (see, for example, Stoute et al. New Engl. J. Med., 336:86-91, 1997).

[0492] In one preferred embodiment, the immunological fusion partner is derived from a Mycobacterium sp., such as a Mycobacterium tuberculosis-derived Ra12 fragment. Ra12 compositions and methods for their use in enhancing the expression and/or immunogenicity of heterologous polynucleotide/polypeptide sequences is described in U.S. Patent Application No. 60/158,585, the disclosure of which is incorporated herein by reference in its entirety. Briefly, Ra12 refers to a polynucleotide region that is a subsequence of a Mycobacterium tuberculosis MTB32A nucleic acid. MTB32A is a serine protease of 32 KD molecular weight encoded by a gene in virulent and avirulent strains of M. tuberculosis. The nucleotide sequence and amino acid sequence of MTB32A have been described (for example, U.S. Patent Application No. 60/158,585; see also, Skeiky et al., Infection and Immun. (1999) 67:3998-4007, incorporated herein by reference). C-terminal fragments of the MTB32A coding sequence express at high levels and remain as a soluble polypeptides throughout the purification process. Moreover, Ra12 may enhance the immunogenicity of heterologous immunogenic polypeptides with which it is fused. One preferred Ra12 fusion polypeptide comprises a 14 KD C-terminal fragment corresponding to amino acid residues 192 to 323 of MTB32A.

[0493] Other preferred Ra12 polynucleotides generally comprise at least about 15 consecutive nucleotides, at least about 30 nucleotides, at least about 60 nucleotides, at least about 100 nucleotides, at least about 200 nucleotides, or at least about 300 nucleotides that encode a portion of a Ra12 polypeptide.

[0494] Ra12 polynucleotides may comprise a native sequence (i.e., an endogenous sequence that encodes a Ra12 polypeptide or a portion thereof) or may comprise a variant of such a sequence. Ra12 polynucleotide variants may contain one or more substitutions, additions, deletions and/or insertions such that the biological activity of the encoded fusion polypeptide is not substantially diminished, relative to a fusion polypeptide comprising a native Ra12 polypeptide. Variants preferably exhibit at least about 70% identity, more preferably at least about 80% identity and most preferably at least about 90% identity to a polynucleotide sequence that encodes a native Ra12 polypeptide or a portion thereof.

[0495] Within other preferred embodiments, an immunological fusion partner is derived from protein D, a surface protein of the gram-negative bacterium Haemophilus influenza B (WO 91/18926). Preferably, a protein D derivative comprises approximately the first third of the protein (e.g., the first N-terminal 100-110 amino acids), and a protein D derivative may be lipidated. Within certain preferred embodiments, the first 109 residues of a Lipoprotein D fusion partner is included on the N-terminus to provide the polypeptide with additional exogenous T-cell epitopes and to increase the expression level in E. coli (thus functioning as an expression enhancer). The lipid tail ensures optimal presentation of the antigen to antigen presenting cells. Other fusion partners include the non-structural protein from influenzae virus, NS1 (hemaglutinin). Typically, the N-terminal 81 amino acids are used, although different fragments that include T-helper epitopes may be used.

[0496] In another embodiment, the immunological fusion partner is the protein known as LYTA, or a portion thereof (preferably a C-terminal portion). LYTA is derived from Streptococcus pneumoniae, which synthesizes an N-acetyl-L-alanine amidase known as amidase LYTA (encoded by the LytA gene; Gene 43:265-292, 1986). LYTA is an autolysin that specifically degrades certain bonds in the peptidoglycan backbone. The C-terminal domain of the LYTA protein is responsible for the affinity to the choline or to some choline analogues such as DEAE. This property has been exploited for the development of E. coli C-LYTA expressing plasmids useful for expression of fusion proteins. Purification of hybrid proteins containing the C-LYTA fragment at the amino terminus has been described (see Biotechnology 10:795-798, 1992). Within a preferred embodiment, a repeat portion of LYTA may be incorporated into a fusion polypeptide. A repeat portion is found in the C-terminal region starting at residue 178. A particularly preferred repeat portion incorporates residues 188-305.

[0497] Yet another illustrative embodiment involves fusion polypeptides, and the polynucleotides encoding them, wherein the fusion partner comprises a targeting signal capable of directing a polypeptide to the endosomal/lysosomal compartment, as described in U.S. Pat. No. 5,633,234. An immunogenic polypeptide of the invention, when fused with this targeting signal, will associate more efficiently with MHC class II molecules and thereby provide enhanced in vivo stimulation of CD4⁺ T-cells specific for the polypeptide.

[0498] Polypeptides of the invention are prepared using any of a variety of well known synthetic and/or recombinant techniques, the latter of which are further described below. Polypeptides, portions and other variants generally less than about 150 amino acids can be generated by synthetic means, using techniques well known to those of ordinary skill in the art. In one illustrative example, such polypeptides are synthesized using any of the commercially available solid-phase techniques, such as the Merrifield solid-phase synthesis method, where amino acids are sequentially added to a growing amino acid chain. See Merrifield, J. Am. Chem. Soc. 85:2149-2146, 1963. Equipment for automated synthesis of polypeptides is commercially available from suppliers such as Perkin Elmer/Applied BioSystems Division (Foster City, Calif.), and may be operated according to the manufacturer's instructions.

[0499] In general, polypeptide compositions (including fusion polypeptides) of the invention are isolated. An “isolated” polypeptide is one that is removed from its original environment. For example, a naturally-occurring protein or polypeptide is isolated if it is separated from some or all of the coexisting materials in the natural system. Preferably, such polypeptides are also purified, e.g., are at least about 90% pure, more preferably at least about 95% pure and most preferably at least about 99% pure.

[0500] Polynucleotide Compositions

[0501] The present invention, in other aspects, provides polynucleotide compositions. The terms “DNA” and “polynucleotide” are used essentially interchangeably herein to refer to a DNA molecule that has been isolated free of total genomic DNA of a particular species. “Isolated,” as used herein, means that a polynucleotide is substantially away from other coding sequences, and that the DNA molecule does not contain large portions of unrelated coding DNA, such as large chromosomal fragments or other functional genes or polypeptide coding regions. Of course, this refers to the DNA molecule as originally isolated, and does not exclude genes or coding regions later added to the segment by the hand of man.

[0502] As will be understood by those skilled in the art, the polynucleotide compositions of this invention can include genomic sequences, extra-genomic and plasmid-encoded sequences and smaller engineered gene segments that express, or may be adapted to express, proteins, polypeptides, peptides and the like. Such segments may be naturally isolated, or modified synthetically by the hand of man.

[0503] As will be also recognized by the skilled artisan, polynucleotides of the invention may be single-stranded (coding or antisense) or double-stranded, and may be DNA (genomic, cDNA or synthetic) or RNA molecules. RNA molecules may include HnRNA molecules, which contain introns and correspond to a DNA molecule in a one-to-one manner, and mRNA molecules, which do not contain introns. Additional coding or non-coding sequences may, but need not, be present within a polynucleotide of the present invention, and a polynucleotide may, but need not, be linked to other molecules and/or support materials.

[0504] Polynucleotides may comprise a native sequence (i.e., an endogenous sequence that encodes a polypeptide/protein of the invention or a portion thereof) or may comprise a sequence that encodes a variant or derivative, preferably and immunogenic variant or derivative, of such a sequence.

[0505] Therefore, according to another aspect of the present invention, polynucleotide compositions are provided that comprise some or all of a polynucleotide sequence set forth in any one of SEQ ID NO:1-3,6-8, 10-13, 15-27, 29, 30, 32, 34-49, 51, 52, 54, 55, 57-59, 61-69, 71, 73, 74, 77, 78, 80-82, 84, 86-96, 107-109, 111, 113, 125, 127, 128, 129, 131-133, 142, 144, 148-151, 153, 154, 157, 158, 160, 167, 168, 171, 179, 182, 184-186, 188-191, 193, 194, 198-207, 209, 210, 213, 214, 217, 220-224, 253-337, 345, 347, 349, 358, 362, 364, 365, 368, 370-375, 420, 424, 428, 431, 434, 442, 447, 450, 467, 478, 479 and 483, complements of a polynucleotide sequence set forth in any one of SEQ ID NO:1-3,6-8, 10-13, 15-27, 29, 30, 32, 34-49, 51, 52, 54, 55, 57-59, 61-69, 71, 73, 74, 77, 78, 80-82, 84, 86-96, 107-109, 111, 113, 125, 127, 128, 129, 131-133, 142, 144, 148-151,153,154,157,158, 160, 167, 168, 171, 179, 182, 184-186, 188-191, 193, 194, 198-207, 209, 210, 213, 214, 217, 220-224, 253-337, 345, 347, 349, 358, 362, 364, 365, 368, 370-375, 420, 424, 428, 431, 434, 442, 447, 450, 467, 478, 479 and 483, and degenerate variants of a polynucleotide sequence set forth in any one of SEQ ID NO:1-3,6-8, 10-13, 15-27, 29, 30, 32, 34-49, 51, 52, 54, 55, 57-59, 61-69, 71, 73, 74, 77, 78, 80-82, 84, 86-96, 107-109, 111, 113, 125, 127, 128, 129, 131-133, 142, 144, 148-151, 153, 154, 157, 158, 160, 167, 168, 171, 179, 182, 184-186, 188-191, 193, 194, 198-207, 209, 210, 213, 214, 217, 220-224, 253-337, 345, 347, 349, 358, 362, 364, 365, 368, 370-375, 420, 424, 428, 431, 434, 442, 447, 450, 467, 478, 479 and 483. In certain preferred embodiments, the polynucleotide sequences set forth herein encode immunogenic polypeptides, as described above.

[0506] In other related embodiments, the present invention provides polynucleotide variants having substantial identity to the sequences disclosed herein in SEQ ID NO:1-3,6-8, 10-13, 15-27, 29, 30, 32, 34-49, 51, 52, 54, 55, 57-59, 61-69, 71, 73, 74, 77, 78, 80-82, 84, 86-96, 107-109, 111, 113, 125, 127, 128, 129, 131-133, 142, 144, 148-151, 153, 154, 157, 158, 160, 167, 168, 171, 179, 182, 184-186, 188-191, 193, 194, 198-207, 209, 210, 213, 214, 217, 220-224, 253-337, 345, 347, 349, 358, 362, 364, 365, 368, 370-375, 420, 424, 428, 431, 434, 442, 447, 450, 467, 478, 479 and 483, for example those comprising at least 70% sequence identity, preferably at least 75%, 80%, 85%, 90%, 95%, 96%, 97%, 98%, or 99% or higher, sequence identity compared to a polynucleotide sequence of this invention using the methods described herein, (e.g., BLAST analysis using standard parameters, as described below). One skilled in this art will recognize that these values can be appropriately adjusted to determine corresponding identity of proteins encoded by two nucleotide sequences by taking into account codon degeneracy, amino acid similarity, reading frame positioning and the like.

[0507] Typically, polynucleotide variants will contain one or more substitutions, additions, deletions and/or insertions, preferably such that the immunogenicity of the polypeptide encoded by the variant polynucleotide is not substantially diminished relative to a polypeptide encoded by a polynucleotide sequence specifically set forth herein). The term “variants” should also be understood to encompasses homologous genes of xenogenic origin.

[0508] In additional embodiments, the present invention provides polynucleotide fragments comprising various lengths of contiguous stretches of sequence identical to or complementary to one or more of the sequences disclosed herein. For example, polynucleotides are provided by this invention that comprise at least about 10, 15, 20, 30, 40, 50, 75, 100, 150, 200, 300, 400, 500 or 1000 or more contiguous nucleotides of one or more of the sequences disclosed herein as well as all intermediate lengths there between. It will be readily understood that “intermediate lengths”, in this context, means any length between the quoted values, such as 16, 17, 18, 19, etc.; 21, 22, 23, etc.; 30, 31, 32, etc.; 50, 51, 52, 53, etc.; 100, 101, 102, 103, etc.; 150, 151, 152, 153, etc.; including all integers through 200-500; 500-1,000, and the like.

[0509] In another embodiment of the invention, polynucleotide compositions are provided that are capable of hybridizing under moderate to high stringency conditions to a polynucleotide sequence provided herein, or a fragment thereof, or a complementary sequence thereof. Hybridization techniques are well known in the art of molecular biology. For purposes of illustration, suitable moderately stringent conditions for testing the hybridization of a polynucleotide of this invention with other polynucleotides include prewashing in a solution of 5× SSC, 0.5% SDS, 1.0 mM EDTA (pH 8.0); hybridizing at 50° C.-60° C., 5× SSC, overnight; followed by washing twice at 65° C. for 20 minutes with each of 2×, 0.5× and 0.2× SSC containing 0.1% SDS. One skilled in the art will understand that the stringency of hybridization can be readily manipulated, such as by altering the salt content of the hybridization solution and/or the temperature at which the hybridization is performed. For example, in another embodiment, suitable highly stringent hybridization conditions include those described above, with the exception that the temperature of hybridization is increased, e.g., to 60-65° C. or 65-70° C.

[0510] In certain preferred embodiments, the polynucleotides described above, e.g., polynucleotide variants, fragments and hybridizing sequences, encode polypeptides that are immunologically cross-reactive with a polypeptide sequence specifically set forth herein. In other preferred embodiments, such polynucleotides encode polypeptides that have a level of immunogenic activity of at least about 50%, preferably at least about 70%, and more preferably at least about 90% of that for a polypeptide sequence specifically set forth herein.

[0511] The polynucleotides of the present invention, or fragments thereof, regardless of the length of the coding sequence itself, may be combined with other DNA sequences, such as promoters, polyadenylation signals, additional restriction enzyme sites, multiple cloning sites, other coding segments, and the like, such that their overall length may vary considerably. It is therefore contemplated that a nucleic acid fragment of almost any length may be employed, with the total length preferably being limited by the ease of preparation and use in the intended recombinant DNA protocol. For example, illustrative polynucleotide segments with total lengths of about 10,000, about 5000, about 3000, about 2,000, about 1,000, about 500, about 200, about 100, about 50 base pairs in length, and the like, (including all intermediate lengths) are contemplated to be useful in many implementations of this invention.

[0512] When comparing polynucleotide sequences, two sequences are said to be “identical” if the sequence of nucleotides in the two sequences is the same when aligned for maximum correspondence, as described below. Comparisons between two sequences are typically performed by comparing the sequences over a comparison window to identify and compare local regions of sequence similarity. A “comparison window” as used herein, refers to a segment of at least about 20 contiguous positions, usually 30 to about 75, 40 to about 50, in which a sequence may be compared to a reference sequence of the same number of contiguous positions after the two sequences are optimally aligned.

[0513] Optimal alignment of sequences for comparison may be conducted using the Megalign program in the Lasergene suite of bioinformatics software (DNASTAR, Inc., Madison, Wis.), using default parameters. This program embodies several alignment schemes described in the following references: Dayhoff, M. O. (1978) A model of evolutionary change in proteins—Matrices for detecting distant relationships. In Dayhoff, M. O. (ed.) Atlas of Protein Sequence and Structure, National Biomedical Research Foundation, Washington D.C. Vol. 5, Suppl. 3, pp. 345-358; Hein J. (1990) Unified Approach to Alignment and Phylogenes pp. 626-645 Methods in Enzymology vol. 183, Academic Press, Inc., San Diego, Calif.; Higgins, D. G. and Sharp, P. M. (1989) CABIOS 5:151-153; Myers, E. W. and Muller W. (1988) CABIOS 4:11-17; Robinson, E. D. (1971) Comb. Theor 11:105; Santou, N. Nes, M. (1987) Mol. Biol. Evol. 4:406-425; Sneath, P. H. A. and Sokal, R. R. (1973) Numerical Taxonomy—the Principles and Practice of Numerical Taxonomy, Freeman Press, San Francisco, Calif.; Wilbur, W. J. and Lipman, D. J. (1983) Proc. Natl. Acad., Sci. USA 80:726-730.

[0514] Alternatively, optimal alignment of sequences for comparison may be conducted by the local identity algorithm of Smith and Waterman (1981) Add. APL. Math 2:482, by the identity alignment algorithm of Needleman and Wunsch (1970) J. Mol. Biol. 48:443, by the search for similarity methods of Pearson and Lipman (1988) Proc. Natl. Acad. Sci. USA 85: 2444, by computerized implementations of these algorithms (GAP, BESTFIT, BLAST, FASTA, and TFASTA in the Wisconsin Genetics Software Package, Genetics Computer Group (GCG), 575 Science Dr., Madison, Wis.), or by inspection.

[0515] One preferred example of algorithms that are suitable for determining percent sequence identity and sequence similarity are the BLAST and BLAST 2.0 algorithms, which are described in Altschul et al. (1977) Nucl. Acids Res. 25:3389-3402 and Altschul et al. (1990) J. Mol. Biol. 215:403-410, respectively. BLAST and BLAST 2.0 can be used, for example with the parameters described herein, to determine percent sequence identity for the polynucleotides of the invention. Software for performing BLAST analyses is publicly available through the National Center for Biotechnology Information. In one illustrative example, cumulative scores can be calculated using, for nucleotide sequences, the parameters M (reward score for a pair of matching residues; always >0) and N (penalty score for mismatching residues; always <0). Extension of the word hits in each direction are halted when: the cumulative alignment score falls off by the quantity X from its maximum achieved value; the cumulative score goes to zero or below, due to the accumulation of one or more negative-scoring residue alignments; or the end of either sequence is reached. The BLAST algorithm parameters W, T and X determine the sensitivity and speed of the alignment. The BLASTN program (for nucleotide sequences) uses as defaults a wordlength (W) of 11, and expectation (E) of 10, and the BLOSUM62 scoring matrix (see Henikoff and Henikoff (1989) Proc. Natl. Acad. Sci. USA 89:10915) alignments, (B) of 50, expectation (E) of 10, M=5, N=−4 and a comparison of both strands.

[0516] Preferably, the “percentage of sequence identity” is determined by comparing two optimally aligned sequences over a window of comparison of at least 20 positions, wherein the portion of the polynucleotide sequence in the comparison window may comprise additions or deletions (i.e., gaps) of 20 percent or less, usually 5 to 15 percent, or 10 to 12 percent, as compared to the reference sequences (which does not comprise additions or deletions) for optimal alignment of the two sequences. The percentage is calculated by determining the number of positions at which the identical nucleic acid bases occurs in both sequences to yield the number of matched positions, dividing the number of matched positions by the total number of positions in the reference sequence (i.e., the window size) and multiplying the results by 100 to yield the percentage of sequence identity.

[0517] It will be appreciated by those of ordinary skill in the art that, as a result of the degeneracy of the genetic code, there are many nucleotide sequences that encode a polypeptide as described herein. Some of these polynucleotides bear minimal homology to the nucleotide sequence of any native gene. Nonetheless, polynucleotides that vary due to differences in codon usage are specifically contemplated by the present invention. Further, alleles of the genes comprising the polynucleotide sequences provided herein are within the scope of the present invention. Alleles are endogenous genes that are altered as a result of one or more mutations, such as deletions, additions and/or substitutions of nucleotides. The resulting mRNA and protein may, but need not, have an altered structure or function. Alleles may be identified using standard techniques (such as hybridization, amplification and/or database sequence comparison).

[0518] Therefore, in another embodiment of the invention, a mutagenesis approach, such as site-specific mutagenesis, is employed for the preparation of immunogenic variants and/or derivatives of the polypeptides described herein. By this approach, specific modifications in a polypeptide sequence can be made through mutagenesis of the underlying polynucleotides that encode them. These techniques provides a straightforward approach to prepare and test sequence variants, for example, incorporating one or more of the foregoing considerations, by introducing one or more nucleotide sequence changes into the polynucleotide.

[0519] Site-specific mutagenesis allows the production of mutants through the use of specific oligonucleotide sequences which encode the DNA sequence of the desired mutation, as well as a sufficient number of adjacent nucleotides, to provide a primer sequence of sufficient size and sequence complexity to form a stable duplex on both sides of the deletion junction being traversed. Mutations may be employed in a selected polynucleotide sequence to improve, alter, decrease, modify, or otherwise change the properties of the polynucleotide itself, and/or alter the properties, activity, composition, stability, or primary sequence of the encoded polypeptide.

[0520] In certain embodiments of the present invention, the inventors contemplate the mutagenesis of the disclosed polynucleotide sequences to alter one or more properties of the encoded polypeptide, such as the immunogenicity of a polypeptide vaccine. The techniques of site-specific mutagenesis are well-known in the art, and are widely used to create variants of both polypeptides and polynucleotides. For example, site-specific mutagenesis is often used to alter a specific portion of a DNA molecule. In such embodiments, a primer comprising typically about 14 to about 25 nucleotides or so in length is employed, with about 5 to about 10 residues on both sides of the junction of the sequence being altered.

[0521] As will be appreciated by those of skill in the art, site-specific mutagenesis techniques have often employed a phage vector that exists in both a single stranded and double stranded form. Typical vectors useful in site-directed mutagenesis include vectors such as the M13 phage. These phage are readily commercially-available and their use is generally well-known to those skilled in the art. Double-stranded plasmids are also routinely employed in site directed mutagenesis that eliminates the step of transferring the gene of interest from a plasmid to a phage.

[0522] In general, site-directed mutagenesis in accordance herewith is performed by first obtaining a single-stranded vector or melting apart of two strands of a double-stranded vector that includes within its sequence a DNA sequence that encodes the desired peptide. An oligonucleotide primer bearing the desired mutated sequence is prepared, generally synthetically. This primer is then annealed with the single-stranded vector, and subjected to DNA polymerizing enzymes such as E. coli polymerase I Klenow fragment, in order to complete the synthesis of the mutation-bearing strand. Thus, a heteroduplex is formed wherein one strand encodes the original non-mutated sequence and the second strand bears the desired mutation. This heteroduplex vector is then used to transform appropriate cells, such as E. coli cells, and clones are selected which include recombinant vectors bearing the mutated sequence arrangement.

[0523] The preparation of sequence variants of the selected peptide-encoding DNA segments using site-directed mutagenesis provides a means of producing potentially useful species and is not meant to be limiting as there are other ways in which sequence variants of peptides and the DNA sequences encoding them may be obtained. For example, recombinant vectors encoding the desired peptide sequence may be treated with mutagenic agents, such as hydroxylamine, to obtain sequence variants. Specific details regarding these methods and protocols are found in the teachings of Maloy et al., 1994; Segal, 1976; Prokop and Bajpai, 1991; Kuby, 1994; and Maniatis et al., 1982, each incorporated herein by reference, for that purpose.

[0524] As used herein, the term “oligonucleotide directed mutagenesis procedure” refers to template-dependent processes and vector-mediated propagation which result in an increase in the concentration of a specific nucleic acid molecule relative to its initial concentration, or in an increase in the concentration of a detectable signal, such as amplification. As used herein, the term “oligonucleotide directed mutagenesis procedure” is intended to refer to a process that involves the template-dependent extension of a primer molecule. The term template dependent process refers to nucleic acid synthesis of an RNA or a DNA molecule wherein the sequence of the newly synthesized strand of nucleic acid is dictated by the well-known rules of complementary base pairing (see, for example, Watson, 1987). Typically, vector mediated methodologies involve the introduction of the nucleic acid fragment into a DNA or RNA vector, the clonal amplification of the vector, and the recovery of the amplified nucleic acid fragment. Examples of such methodologies are provided by U.S. Pat. No. 4,237,224, specifically incorporated herein by reference in its entirety.

[0525] In another approach for the production of polypeptide variants of the present invention, recursive sequence recombination, as described in U.S. Pat. No. 5,837,458, may be employed. In this approach, iterative cycles of recombination and screening or selection are performed to “evolve” individual polynucleotide variants of the invention having, for example, enhanced immunogenic activity.

[0526] In other embodiments of the present invention, the polynucleotide sequences provided herein can be advantageously used as probes or primers for nucleic acid hybridization. As such, it is contemplated that nucleic acid segments that comprise a sequence region of at least about 15 nucleotide long contiguous sequence that has the same sequence as, or is complementary to, a 15 nucleotide long contiguous sequence disclosed herein will find particular utility. Longer contiguous identical or complementary sequences, e.g., those of about 20, 30, 40, 50, 100, 200, 500, 1000 (including all intermediate lengths) and even up to full length sequences will also be of use in certain embodiments.

[0527] The ability of such nucleic acid probes to specifically hybridize to a sequence of interest will enable them to be of use in detecting the presence of complementary sequences in a given sample. However, other uses are also envisioned, such as the use of the sequence information for the preparation of mutant species primers, or primers for use in preparing other genetic constructions.

[0528] Polynucleotide molecules having sequence regions consisting of contiguous nucleotide stretches of 10-14, 15-20, 30, 50, or even of 100-200 nucleotides or so (including intermediate lengths as well), identical or complementary to a polynucleotide sequence disclosed herein, are particularly contemplated as hybridization probes for use in, e.g., Southern and Northern blotting. This would allow a gene product, or fragment thereof, to be analyzed, both in diverse cell types and also in various bacterial cells. The total size of fragment, as well as the size of the complementary stretch(es), will ultimately depend on the intended use or application of the particular nucleic acid segment. Smaller fragments will generally find use in hybridization embodiments, wherein the length of the contiguous complementary region may be varied, such as between about 15 and about 100 nucleotides, but larger contiguous complementarity stretches may be used, according to the length complementary sequences one wishes to detect.

[0529] The use of a hybridization probe of about 15-25 nucleotides in length allows the formation of a duplex molecule that is both stable and selective. Molecules having contiguous complementary sequences over stretches greater than 15 bases in length are generally preferred, though, in order to increase stability and selectivity of the hybrid, and thereby improve the quality and degree of specific hybrid molecules obtained. One will generally prefer to design nucleic acid molecules having gene-complementary stretches of 15 to 25 contiguous nucleotides, or even longer where desired.

[0530] Hybridization probes may be selected from any portion of any of the sequences disclosed herein. All that is required is to review the sequences set forth herein, or to any continuous portion of the sequences, from about 15-25 nucleotides in length up to and including the full length sequence, that one wishes to utilize as a probe or primer. The choice of probe and primer sequences may be governed by various factors. For example, one may wish to employ primers from towards the termini of the total sequence.

[0531] Small polynucleotide segments or fragments may be readily prepared by, for example, directly synthesizing the fragment by chemical means, as is commonly practiced using an automated oligonucleotide synthesizer. Also, fragments may be obtained by application of nucleic acid reproduction technology, such as the PCR™ technology of U.S. Pat. No. 4,683,202 (incorporated herein by reference), by introducing selected sequences into recombinant vectors for recombinant production, and by other recombinant DNA techniques generally known to those of skill in the art of molecular biology.

[0532] The nucleotide sequences of the invention may be used for their ability to selectively form duplex molecules with complementary stretches of the entire gene or gene fragments of interest. Depending on the application envisioned, one will typically desire to employ varying conditions of hybridization to achieve varying degrees of selectivity of probe towards target sequence. For applications requiring high selectivity, one will typically desire to employ relatively stringent conditions to form the hybrids, e.g., one will select relatively low salt and/or high temperature conditions, such as provided by a salt concentration of from about 0.02 M to about 0.15 M salt at temperatures of from about 50° C. to about 70° C. Such selective conditions tolerate little, if any, mismatch between the probe and the template or target strand, and would be particularly suitable for isolating related sequences.

[0533] Of course, for some applications, for example, where one desires to prepare mutants employing a mutant primer strand hybridized to an underlying template, less stringent (reduced stringency) hybridization conditions will typically be needed in order to allow formation of the heteroduplex. In these circumstances, one may desire to employ salt conditions such as those of from about 0.15 M to about 0.9 M salt, at temperatures ranging from about 20° C. to about 55° C. Cross-hybridizing species can thereby be readily identified as positively hybridizing signals with respect to control hybridizations. In any case, it is generally appreciated that conditions can be rendered more stringent by the addition of increasing amounts of formamide, which serves to destabilize the hybrid duplex in the same manner as increased temperature. Thus, hybridization conditions can be readily manipulated, and thus will generally be a method of choice depending on the desired results.

[0534] According to another embodiment of the present invention, polynucleotide compositions comprising antisense oligonucleotides are provided. Antisense oligonucleotides have been demonstrated to be effective and targeted inhibitors of protein synthesis, and, consequently, provide a therapeutic approach by which a disease can be treated by inhibiting the synthesis of proteins that contribute to the disease. The efficacy of antisense oligonucleotides for inhibiting protein synthesis is well established. For example, the synthesis of polygalactauronase and the muscarine type 2 acetylcholine receptor are inhibited by antisense oligonucleotides directed to their respective mRNA sequences (U.S. Pat. No. 5,739,119 and U.S. Pat. No. 5,759,829). Further, examples of antisense inhibition have been demonstrated with the nuclear protein cyclin, the multiple drug resistance gene (MDG1), ICAM-1, E-selectin, STK-1, striatal GABA_{A} receptor and human EGF (Jaskulski et al., Science. 1988 Jun 10;240(4858):1544-6; Vasanthakumar and Ahmed, Cancer Commun. 1989;1(4):225-32; Peris et al., Brain Res Mol Brain Res. 1998 June 15;57(2):310-20; U.S. Pat. No. 5,801,154; U.S. Pat. No. 5,789,573; U.S. Pat. No. 5,718,709 and U.S. Pat. No. 5,610,288). Antisense constructs have also been described that inhibit and can be used to treat a variety of abnormal cellular proliferations, e.g. cancer (U.S. Pat. No. 5,747,470; U.S. Pat. No. 5,591,317 and U.S. Pat. No. 5,783,683).

[0535] Therefore, in certain embodiments, the present invention provides oligonucleotide sequences that comprise all, or a portion of, any sequence that is capable of specifically binding to polynucleotide sequence described herein, or a complement thereof. In one embodiment, the antisense oligonucleotides comprise DNA or derivatives thereof. In another embodiment, the oligonucleotides comprise RNA or derivatives thereof. In a third embodiment, the oligonucleotides are modified DNAs comprising a phosphorothioated modified backbone. In a fourth embodiment, the oligonucleotide sequences comprise peptide nucleic acids or derivatives thereof. In each case, preferred compositions comprise a sequence region that is complementary, and more preferably substantially-complementary, and even more preferably, completely complementary to one or more portions of polynucleotides disclosed herein. Selection of antisense compositions specific for a given gene sequence is based upon analysis of the chosen target sequence and determination of secondary structure, Tₘ, binding energy, and relative stability. Antisense compositions may be selected based upon their relative inability to form dimers, hairpins, or other secondary structures that would reduce or prohibit specific binding to the target mRNA in a host cell. Highly preferred target regions of the mRNA, are those which are at or near the AUG translation initiation codon, and those sequences which are substantially complementary to 5′ regions of the mRNA. These secondary structure analyses and target site selection considerations can be performed, for example, using v.4 of the OLIGO primer analysis software and/or the BLASTN 2.0.5 algorithm software (Altschul et al., Nucleic Acids Res. 1997, 25(17):3389-402).

[0536] The use of an antisense delivery method employing a short peptide vector, termed MPG (27 residues), is also contemplated. The MPG peptide contains a hydrophobic domain derived from the fusion sequence of HIV gp41 and a hydrophilic domain from the nuclear localization sequence of SV40 T-antigen (Morris et al., Nucleic Acids Res. 1997 July 15;25(14):2730-6). It has been demonstrated that several molecules of the MPG peptide coat the antisense oligonucleotides and can be delivered into cultured mammalian cells in less than 1 hour with relatively high efficiency (90%). Further, the interaction with MPG strongly increases both the stability of the oligonucleotide to nuclease and the ability to cross the plasma membrane.

[0537] According to another embodiment of the invention, the polynucleotide compositions described herein are used in the design and preparation of ribozyme molecules for inhibiting expression of the tumor polypeptides and proteins of the present invention in tumor cells. Ribozymes are RNA-protein complexes that cleave nucleic acids in a site-specific fashion. Ribozymes have specific catalytic domains that possess endonuclease activity (Kim and Cech, Proc Natl Acad Sci U S A. 1987 Dec;84(24):8788-92; Forster and Symons, Cell. 1987 Apr 24;49(2):211-20). For example, a large number of ribozymes accelerate phosphoester transfer reactions with a high degree of specificity, often cleaving only one of several phosphoesters in an oligonucleotide substrate (Cech et al., Cell. 1981 Dec;27(3 Pt 2):487-96; Michel and Westhof, J. Mol. Biol. 1990 Dec 5;216(3):585-610; Reinhold-Hurek and Shub, Nature. 1992 May 14;357(6374):173-6). This specificity has been attributed to the requirement that the substrate bind via specific base-pairing interactions to the internal guide sequence (“IGS”) of the ribozyme prior to chemical reaction.

[0538] Six basic varieties of naturally-occurring enzymatic RNAs are known presently. Each can catalyze the hydrolysis of RNA phosphodiester bonds in trans (and thus can cleave other RNA molecules) under physiological conditions. In general, enzymatic nucleic acids act by first binding to a target RNA. Such binding occurs through the target binding portion of a enzymatic nucleic acid which is held in close proximity to an enzymatic portion of the molecule that acts to cleave the target RNA. Thus, the enzymatic nucleic acid first recognizes and then binds a target RNA through complementary base-pairing, and once bound to the correct site, acts enzymatically to cut the target RNA. Strategic cleavage of such a target RNA will destroy its ability to direct synthesis of an encoded protein. After an enzymatic nucleic acid has bound and cleaved its RNA target, it is released from that RNA to search for another target and can repeatedly bind and cleave new targets.

[0539] The enzymatic nature of a ribozyme is advantageous over many technologies, such as antisense technology (where a nucleic acid molecule simply binds to a nucleic acid target to block its translation) since the concentration of ribozyme necessary to affect a therapeutic treatment is lower than that of an antisense oligonucleotide. This advantage reflects the ability of the ribozyme to act enzymatically. Thus, a single ribozyme molecule is able to cleave many molecules of target RNA. In addition, the ribozyme is a highly specific inhibitor, with the specificity of inhibition depending not only on the base pairing mechanism of binding to the target RNA, but also on the mechanism of target RNA cleavage. Single mismatches, or base-substitutions, near the site of cleavage can completely eliminate catalytic activity of a ribozyme. Similar mismatches in antisense molecules do not prevent their action (Woolf et al., Proc Natl Acad Sci U S A. 1992 Aug 15;89(16):7305-9). Thus, the specificity of action of a ribozyme is greater than that of an antisense oligonucleotide binding the same RNA site.

[0540] The enzymatic nucleic acid molecule may be formed in a hammerhead, hairpin, a hepatitis 6 virus, group I intron or RNaseP RNA (in association with an RNA guide sequence) or Neurospora VS RNA motif. Examples of hammerhead motifs are described by Rossi et al. Nucleic Acids Res. 1992 Sep 11;20(17):4559-65. Examples of hairpin motifs are described by Hampel et al. (Eur. Pat. Appl. Publ. No. EP 0360257), Hampel and Tritz, Biochemistry 1989 Jun 13;28(12):4929-33; Hampel et al., Nucleic Acids Res. 1990 Jan 25;18(2):299-304 and U.S. Pat. No. 5,631,359. An example of the hepatitis 6 virus motif is described by Perrotta and Been, Biochemistry. 1992 Dec 1;31(47):11843-52; an example of the RNaseP motif is described by Guerrier-Takada et al., Cell. 1983 Dec;35(3 Pt 2):849-57; Neurospora VS RNA ribozyme motif is described by Collins (Saville and Collins, Cell. 1990 May 18;61(4):685-96; Saville and Collins, Proc Natl Acad Sci U S A. 1991 Oct 1;88(19):8826-30; Collins and Olive, Biochemistry. 1993 Mar 23;32(11):2795-9); and an example of the Group I intron is described in (U.S. Pat. No. 4,987,071). All that is important in an enzymatic nucleic acid molecule of this invention is that it has a specific substrate binding site which is complementary to one or more of the target gene RNA regions, and that it have nucleotide sequences within or surrounding that substrate binding site which impart an RNA cleaving activity to the molecule. Thus the ribozyme constructs need not be limited to specific motifs mentioned herein.

[0541] Ribozymes may be designed as described in Int. Pat. Appl. Publ. No. WO 93/23569 and Int. Pat. Appl. Publ. No. WO 94/02595, each specifically incorporated herein by reference) and synthesized to be tested in vitro and in vivo, as described. Such ribozymes can also be optimized for delivery. While specific examples are provided, those in the art will recognize that equivalent RNA targets in other species can be utilized when necessary.

[0542] Ribozyme activity can be optimized by altering the length of the ribozyme binding arms, or chemically synthesizing ribozymes with modifications that prevent their degradation by serum ribonucleases (see e.g., Int. Pat. Appl. Publ. No. WO 92/07065; Int. Pat. Appl. Publ. No. WO 93/15187; Int. Pat. Appl. Publ. No. WO 91/03162; Eur. Pat. Appl. Publ. No. 92110298.4; U.S. Pat. No. 5,334,711; and Int. Pat. Appl. Publ. No. WO 94/13688, which describe various chemical modifications that can be made to the sugar moieties of enzymatic RNA molecules), modifications which enhance their efficacy in cells, and removal of stem II bases to shorten RNA synthesis times and reduce chemical requirements.

[0543] Sullivan et al. (Int. Pat. Appl. Publ. No. WO 94/02595) describes the general methods for delivery of enzymatic RNA molecules. Ribozymes may be administered to cells by a variety of methods known to those familiar to the art, including, but not restricted to, encapsulation in liposomes, by iontophoresis, or by incorporation into other vehicles, such as hydrogels, cyclodextrins, biodegradable nanocapsules, and bioadhesive microspheres. For some indications, ribozymes may be directly delivered ex vivo to cells or tissues with or without the aforementioned vehicles. Alternatively, the RNA/vehicle combination may be locally delivered by direct inhalation, by direct injection or by use of a catheter, infusion pump or stint. Other routes of delivery include, but are not limited to, intravascular, intramuscular, subcutaneous or joint injection, aerosol inhalation, oral (tablet or pill form), topical, systemic, ocular, intraperitoneal and/or intrathecal delivery. More detailed descriptions of ribozyme delivery and administration are provided in Int. Pat. Appl. Publ. No. WO 94/02595 and Int. Pat. Appl. Publ. No. WO 93/23569, each specifically incorporated herein by reference.

[0544] Another means of accumulating high concentrations of a ribozyme(s) within cells is to incorporate the ribozyme-encoding sequences into a DNA expression vector. Transcription of the ribozyme sequences are driven from a promoter for eukaryotic RNA polymerase I (pol I), RNA polymerase II (pol II), or RNA polymerase III (pol III). Transcripts from pol II or pol III promoters will be expressed at high levels in all cells; the levels of a given pol II promoter in a given cell type will depend on the nature of the gene regulatory sequences (enhancers, silencers, etc.) present nearby. Prokaryotic RNA polymerase promoters may also be used, providing that the prokaryotic RNA polymerase enzyme is expressed in the appropriate cells. Ribozymes expressed from such promoters have been shown to function in mammalian cells. Such transcription units can be incorporated into a variety of vectors for introduction into mammalian cells, including but not restricted to, plasmid DNA vectors, viral DNA vectors (such as adenovirus or adeno-associated vectors), or viral RNA vectors (such as retroviral, semliki forest virus, sindbis virus vectors).

[0545] In another embodiment of the invention, peptide nucleic acids (PNAs) compositions are provided. PNA is a DNA mimic in which the nucleobases are attached to a pseudopeptide backbone (Good and Nielsen, Antisense Nucleic Acid Drug Dev. 1997 7(4) 431-37). PNA is able to be utilized in a number methods that traditionally have used RNA or DNA. Often PNA sequences perform better in techniques than the corresponding RNA or DNA sequences and have utilities that are not inherent to RNA or DNA. A review of PNA including methods of making, characteristics of, and methods of using, is provided by Corey (Trends Biotechnol 1997 Jun;15(6):224-9). As such, in certain embodiments, one may prepare PNA sequences that are complementary to one or more portions of the ACE mRNA sequence, and such PNA compositions may be used to regulate, alter, decrease, or reduce the translation of ACE-specific mRNA, and thereby alter the level of ACE activity in a host cell to which such PNA compositions have been administered.

[0546] PNAs have 2-aminoethyl-glycine linkages replacing the normal phosphodiester backbone of DNA (Nielsen et al., Science 1991 Dec 6;254(5037):1497-500; Hanvey et al., Science. 1992 Nov 27;258(5087):1481-5; Hyrup and Nielsen, Bioorg Med Chem. 1996 Jan;4(1):5-23). This chemistry has three important consequences: firstly, in contrast to DNA or phosphorothioate oligonucleotides, PNAs are neutral molecules; secondly, PNAs are achiral, which avoids the need to develop a stereoselective synthesis; and thirdly, PNA synthesis uses standard Boc or Fmoc protocols for solid-phase peptide synthesis, although other methods, including a modified Merrifield method, have been used.

[0547] PNA monomers or ready-made oligomers are commercially available from PerSeptive Biosystems (Framingham, Mass.). PNA syntheses by either Boc or Fmoc protocols are straightforward using manual or automated protocols (Norton et al., Bioorg Med Chem. 1995 Apr;3(4):437-45). The manual protocol lends itself to the production of chemically modified PNAs or the simultaneous synthesis of families of closely related PNAs.

[0548] As with peptide synthesis, the success of a particular PNA synthesis will depend on the properties of the chosen sequence. For example, while in theory PNAs can incorporate any combination of nucleotide bases, the presence of adjacent purines can lead to deletions of one or more residues in the product. In expectation of this difficulty, it is suggested that, in producing PNAs with adjacent purines, one should repeat the coupling of residues likely to be added inefficiently. This should be followed by the purification of PNAs by reverse-phase high-pressure liquid chromatography, providing yields and purity of product similar to those observed during the synthesis of peptides.

[0549] Modifications of PNAs for a given application may be accomplished by coupling amino acids during solid-phase synthesis or by attaching compounds that contain a carboxylic acid group to the exposed N-terminal amine. Alternatively, PNAs can be modified after synthesis by coupling to an introduced lysine or cysteine. The ease with which PNAs can be modified facilitates optimization for better solubility or for specific functional requirements. Once synthesized, the identity of PNAs and their derivatives can be confirmed by mass spectrometry. Several studies have made and utilized modifications of PNAs (for example, Norton et al., Bioorg Med Chem. 1995 Apr;3(4):437-45; Petersen et al., J Pept Sci. 1995 May-Jun;1(3):175-83; Orum et al., Biotechniques. 1995 Sep;19(3):472-80; Footer et al., Biochemistry. 1996 Aug 20;35(33):10673-9; Griffith et al., Nucleic Acids Res. 1995 Aug 11;23(15):3003-8; Pardridge et al., Proc Natl Acad Sci U S A. 1995 Jun 6;92(12):5592-6; Boffa et al., Proc Natl Acad Sci U S A. 1995 Mar 14;92(6):1901-5; Gambacorti-Passerini et al., Blood. 1996 Aug 15;88(4):1411-7; Armitage et al., Proc Natl Acad Sci U S A 1997 Nov 11;94(23):12320-5; Seeger et al., Biotechniques. 1997 Sep;23(3):512-7). U.S. Pat. No. 5,700,922 discusses PNA-DNA-PNA chimeric molecules and their uses in diagnostics, modulating protein in organisms, and treatment of conditions susceptible to therapeutics.

[0550] Methods of characterizing the antisense binding properties of PNAs are discussed in Rose (Anal Chem. 1993 Dec 15;65(24):3545-9) and Jensen et al. (Biochemistry. 1997 Apr 22;36(16):5072-7). Rose uses capillary gel electrophoresis to determine binding of PNAs to their complementary oligonucleotide, measuring the relative binding kinetics and stoichiometry. Similar types of measurements were made by Jensen et al. using BIAcore™ technology.

[0551] Other applications of PNAs that have been described and will be apparent to the skilled artisan include use in DNA strand invasion, antisense inhibition, mutational analysis, enhancers of transcription, nucleic acid purification, isolation of transcriptionally active genes, blocking of transcription factor binding, genome cleavage, biosensors, in situ hybridization, and the like.

[0552] Polynucleotide Identification, Characterization and Expression

[0553] Polynucleotides compositions of the present invention may be identified, prepared and/or manipulated using any of a variety of well established techniques (see generally, Sambrook et al., Molecular Cloning: A Laboratory Manual, Cold Spring Harbor Laboratories, Cold Spring Harbor, N.Y., 1989, and other like references). For example, a polynucleotide may be identified, as described in more detail below, by screening a microarray of cDNAs for tumor-associated expression (i.e., expression that is at least two fold greater in a tumor than in normal tissue, as determined using a representative assay provided herein). Such screens may be performed, for example, using the microarray technology of Affymetrix, Inc. (Santa Clara, Calif.) according to the manufacturer's instructions (and essentially as described by Schena et al., Proc. Natl. Acad. Sci. USA 93:10614-10619, 1996 and Heller et al., Proc. Natl. Acad. Sci. USA 94:2150-2155, 1997). Alternatively, polynucleotides may be amplified from cDNA prepared from cells expressing the proteins described herein, such as tumor cells.

[0554] Many template dependent processes are available to amplify a target sequences of interest present in a sample. One of the best known amplification methods is the polymerase chain reaction (PCR™) which is described in detail in U.S. Pat. Nos. 4,683,195, 4,683,202 and 4,800,159, each of which is incorporated herein by reference in its entirety. Briefly, in PCR™, two primer sequences are prepared which are complementary to regions on opposite complementary strands of the target sequence. An excess of deoxynucleoside triphosphates is added to a reaction mixture along with a DNA polymerase (e.g., Taq polymerase). If the target sequence is present in a sample, the primers will bind to the target and the polymerase will cause the primers to be extended along the target sequence by adding on nucleotides. By raising and lowering the temperature of the reaction mixture, the extended primers will dissociate from the target to form reaction products, excess primers will bind to the target and to the reaction product and the process is repeated. Preferably reverse transcription and PCR™ amplification procedure may be performed in order to quantify the amount of mRNA amplified. Polymerase chain reaction methodologies are well known in the art.

[0555] Any of a number of other template dependent processes, many of which are variations of the PCR™ amplification technique, are readily known and available in the art. Illustratively, some such methods include the ligase chain reaction (referred to as LCR), described, for example, in Eur. Pat. Appl. Publ. No. 320,308 and U.S. Pat. No. 4,883,750; Qbeta Replicase, described in PCT Intl. Pat. Appl. Publ. No. PCT/US87/00880; Strand Displacement Amplification (SDA) and Repair Chain Reaction (RCR). Still other amplification methods are described in Great Britain Pat. Appl. No. 2 202 328, and in PCT Intl. Pat. Appl. Publ. No. PCT/US89/01025. Other nucleic acid amplification procedures include transcription-based amplification systems (TAS) (PCT Intl. Pat. Appl. Publ. No. WO 88/10315), including nucleic acid sequence based amplification (NASBA) and 3SR. Eur. Pat. Appl. Publ. No. 329,822 describes a nucleic acid amplification process involving cyclically synthesizing single-stranded RNA (“ssRNA”), ssDNA, and double-stranded DNA (dsDNA). PCT Intl. Pat. Appl. Publ. No. WO 89/06700 describes a nucleic acid sequence amplification scheme based on the hybridization of a promoter/primer sequence to a target single-stranded DNA (“ssDNA”) followed by transcription of many RNA copies of the sequence. Other amplification methods such as “RACE” (Frohman, 1990), and “one-sided PCR” (Ohara, 1989) are also well-known to those of skill in the art.

[0556] An amplified portion of a polynucleotide of the present invention may be used to isolate a full length gene from a suitable library (e.g., a tumor cDNA library) using well known techniques. Within such techniques, a library (cDNA or genomic) is screened using one or more polynucleotide probes or primers suitable for amplification. Preferably, a library is size-selected to include larger molecules. Random primed libraries may also be preferred for identifying 5′ and upstream regions of genes. Genomic libraries are preferred for obtaining introns and extending 5′ sequences.

[0557] For hybridization techniques, a partial sequence may be labeled (e.g., by nick-translation or end-labeling with ³²P) using well known techniques. A bacterial or bacteriophage library is then generally screened by hybridizing filters containing denatured bacterial colonies (or lawns containing phage plaques) with the labeled probe (see Sambrook et al., Molecular Cloning: A Laboratory Manual, Cold Spring Harbor Laboratories, Cold Spring Harbor, N.Y., 1989). Hybridizing colonies or plaques are selected and expanded, and the DNA is isolated for further analysis. cDNA clones may be analyzed to determine the amount of additional sequence by, for example, PCR using a primer from the partial sequence and a primer from the vector. Restriction maps and partial sequences may be generated to identify one or more overlapping clones. The complete sequence may then be determined using standard techniques, which may involve generating a series of deletion clones. The resulting overlapping sequences can then assembled into a single contiguous sequence. A full length cDNA molecule can be generated by ligating suitable fragments, using well known techniques.

[0558] Alternatively, amplification techniques, such as those described above, can be useful for obtaining a full length coding sequence from a partial cDNA sequence. One such amplification technique is inverse PCR (see Triglia et al., Nucl. Acids Res. 16:8186, 1988), which uses restriction enzymes to generate a fragment in the known region of the gene. The fragment is then circularized by intramolecular ligation and used as a template for PCR with divergent primers derived from the known region. Within an alternative approach, sequences adjacent to a partial sequence may be retrieved by amplification with a primer to a linker sequence and a primer specific to a known region. The amplified sequences are typically subjected to a second round of amplification with the same linker primer and a second primer specific to the known region. A variation on this procedure, which employs two primers that initiate extension in opposite directions from the known sequence, is described in WO 96/38591. Another such technique is known as “rapid amplification of cDNA ends” or RACE. This technique involves the use of an internal primer and an external primer, which hybridizes to a polyA region or vector sequence, to identify sequences that are 5′ and 3′ of a known sequence. Additional techniques include capture PCR (Lagerstrom et al., PCR Methods Applic. 1:111-19, 1991) and walking PCR (Parker et al., Nucl. Acids. Res. 19:3055-60, 1991). Other methods employing amplification may also be employed to obtain a full length cDNA sequence.

[0559] In certain instances, it is possible to obtain a full length cDNA sequence by analysis of sequences provided in an expressed sequence tag (EST) database, such as that available from GenBank. Searches for overlapping ESTs may generally be performed using well known programs (e.g., NCBI BLAST searches), and such ESTs may be used to generate a contiguous full length sequence. Full length DNA sequences may also be obtained by analysis of genomic fragments.

[0560] In other embodiments of the invention, polynucleotide sequences or fragments thereof which encode polypeptides of the invention, or fusion proteins or functional equivalents thereof, may be used in recombinant DNA molecules to direct expression of a polypeptide in appropriate host cells. Due to the inherent degeneracy of the genetic code, other DNA sequences that encode substantially the same or a functionally equivalent amino acid sequence may be produced and these sequences may be used to clone and express a given polypeptide.

[0561] As will be understood by those of skill in the art, it may be advantageous in some instances to produce polypeptide-encoding nucleotide sequences possessing non-naturally occurring codons. For example, codons preferred by a particular prokaryotic or eukaryotic host can be selected to increase the rate of protein expression or to produce a recombinant RNA transcript having desirable properties, such as a half-life which is longer than that of a transcript generated from the naturally occurring sequence.

[0562] Moreover, the polynucleotide sequences of the present invention can be engineered using methods generally known in the art in order to alter polypeptide encoding sequences for a variety of reasons, including but not limited to, alterations which modify the cloning, processing, and/or expression of the gene product. For example, DNA shuffling by random fragmentation and PCR reassembly of gene fragments and synthetic oligonucleotides may be used to engineer the nucleotide sequences. In addition, site-directed mutagenesis may be used to insert new restriction sites, alter glycosylation patterns, change codon preference, produce splice variants, or introduce mutations, and so forth.

[0563] In another embodiment of the invention, natural, modified, or recombinant nucleic acid sequences may be ligated to a heterologous sequence to encode a fusion protein. For example, to screen peptide libraries for inhibitors of polypeptide activity, it may be useful to encode a chimeric protein that can be recognized by a commercially available antibody. A fusion protein may also be engineered to contain a cleavage site located between the polypeptide-encoding sequence and the heterologous protein sequence, so that the polypeptide may be cleaved and purified away from the heterologous moiety.

[0564] Sequences encoding a desired polypeptide may be synthesized, in whole or in part, using chemical methods well known in the art (see Caruthers, M. H. et al. (1980) Nucl. Acids Res. Symp. Ser. 215-223, Horn, T. et al. (1980) Nucl. Acids Res. Symp. Ser. 225-232). Alternatively, the protein itself may be produced using chemical methods to synthesize the amino acid sequence of a polypeptide, or a portion thereof. For example, peptide synthesis can be performed using various solid-phase techniques (Roberge, J. Y. et al. (1995) Science 269:202-204) and automated synthesis may be achieved, for example, using the ABI 431 A Peptide Synthesizer (Perkin Elmer, Palo Alto, Calif.).

[0565] A newly synthesized peptide may be substantially purified by preparative high performance liquid chromatography (e.g., Creighton, T. (1983) Proteins, Structures and Molecular Principles, W H Freeman and Co., New York, N.Y.) or other comparable techniques available in the art. The composition of the synthetic peptides may be confirmed by amino acid analysis or sequencing (e.g., the Edman degradation procedure). Additionally, the amino acid sequence of a polypeptide, or any part thereof, may be altered during direct synthesis and/or combined using chemical methods with sequences from other proteins, or any part thereof, to produce a variant polypeptide.

[0566] In order to express a desired polypeptide, the nucleotide sequences encoding the polypeptide, or functional equivalents, may be inserted into appropriate expression vector, i.e., a vector which contains the necessary elements for the transcription and translation of the inserted coding sequence. Methods which are well known to those skilled in the art may be used to construct expression vectors containing sequences encoding a polypeptide of interest and appropriate transcriptional and translational control elements. These methods include in vitro recombinant DNA techniques, synthetic techniques, and in vivo genetic recombination. Such techniques are described, for example, in Sambrook, J. et al. (1989) Molecular Cloning, A Laboratory Manual, Cold Spring Harbor Press, Plainview, N.Y., and Ausubel, F. M. et al. (1989) Current Protocols in Molecular Biology, John Wiley & Sons, New York. N.Y.

[0567] A variety of expression vector/host systems may be utilized to contain and express polynucleotide sequences. These include, but are not limited to, microorganisms such as bacteria transformed with recombinant bacteriophage, plasmid, or cosmid DNA expression vectors; yeast transformed with yeast expression vectors; insect cell systems infected with virus expression vectors (e.g., baculovirus); plant cell systems transformed with virus expression vectors (e.g., cauliflower mosaic virus, CaMV; tobacco mosaic virus, TMV) or with bacterial expression vectors (e.g., Ti or pBR322 plasmids); or animal cell systems.

[0568] The “control elements” or “regulatory sequences” present in an expression vector are those non-translated regions of the vector—enhancers, promoters, 5′ and 3′ untranslated regions—which interact with host cellular proteins to carry out transcription and translation. Such elements may vary in their strength and specificity. Depending on the vector system and host utilized, any number of suitable transcription and translation elements, including constitutive and inducible promoters, may be used. For example, when cloning in bacterial systems, inducible promoters such as the hybrid lacZ promoter of the PBLUESCRIPT phagemid (Stratagene, La Jolla, Calif.) or PSPORT1 plasmid (Gibco BRL, Gaithersburg, Md.) and the like may be used. In mammalian cell systems, promoters from mammalian genes or from mammalian viruses are generally preferred. If it is necessary to generate a cell line that contains multiple copies of the sequence encoding a polypeptide, vectors based on SV40 or EBV may be advantageously used with an appropriate selectable marker.

[0569] In bacterial systems, any of a number of expression vectors may be selected depending upon the use intended for the expressed polypeptide. For example, when large quantities are needed, for example for the induction of antibodies, vectors which direct high level expression of fusion proteins that are readily purified may be used. Such vectors include, but are not limited to, the multifunctional E. coli cloning and expression vectors such as BLUESCRIPT (Stratagene), in which the sequence encoding the polypeptide of interest may be ligated into the vector in frame with sequences for the amino-terminal Met and the subsequent 7 residues of .beta.-galactosidase so that a hybrid protein is produced; pIN vectors (Van Heeke, G. and S. M. Schuster (1989) J. Biol. Chem. 264:5503-5509); and the like. pGEX Vectors (Promega, Madison, Wis.) may also be used to express foreign polypeptides as fusion proteins with glutathione S-transferase (GST). In general, such fusion proteins are soluble and can easily be purified from lysed cells by adsorption to glutathione-agarose beads followed by elution in the presence of free glutathione. Proteins made in such systems may be designed to include heparin, thrombin, or factor XA protease cleavage sites so that the cloned polypeptide of interest can be released from the GST moiety at will.

[0570] In the yeast, Saccharomyces cerevisiae, a number of vectors containing constitutive or inducible promoters such as alpha factor, alcohol oxidase, and PGH may be used. For reviews, see Ausubel et al. (supra) and Grant et al. (1987) Methods Enzymol. 153:516-544.

[0571] In cases where plant expression vectors are used, the expression of sequences encoding polypeptides may be driven by any of a number of promoters. For example, viral promoters such as the 35S and 19S promoters of CaMV may be used alone or in combination with the omega leader sequence from TMV (Takamatsu, N. (1987) EMBO J. 6:307-311. Alternatively, plant promoters such as the small subunit of RUBISCO or heat shock promoters may be used (Coruzzi, G. et al. (1984) EMBO J. 3:1671-1680; Broglie, R. et al. (1984) Science 224:838-843, and Winter, J. et al. (1991) Results Probl. Cell Differ. 17:85-105). These constructs can be introduced into plant cells by direct DNA transformation or pathogen-mediated transfection. Such techniques are described in a number of generally available reviews (see, for example, Hobbs, S. or Murry, L. E. in McGraw Hill Yearbook of Science and Technology (1992) McGraw Hill, New York, N.Y.; pp. 191-196).

[0572] An insect system may also be used to express a polypeptide of interest. For example, in one such system, Autographa californica nuclear polyhedrosis virus (AcNPV) is used as a vector to express foreign genes in Spodoptera frugiperda cells or in Trichoplusia larvae. The sequences encoding the polypeptide may be cloned into a non-essential region of the virus, such as the polyhedrin gene, and placed under control of the polyhedrin promoter. Successful insertion of the polypeptide-encoding sequence will render the polyhedrin gene inactive and produce recombinant virus lacking coat protein. The recombinant viruses may then be used to infect, for example, S. frugiperda cells or Trichoplusia larvae in which the polypeptide of interest may be expressed (Engelhard, E. K. et al. (1994) Proc. Natl. Acad. Sci. 91 :3224-3227).

[0573] In mammalian host cells, a number of viral-based expression systems are generally available. For example, in cases where an adenovirus is used as an expression vector, sequences encoding a polypeptide of interest may be ligated into an adenovirus transcription/translation complex consisting of the late promoter and tripartite leader sequence. Insertion in a non-essential E1 or E3 region of the viral genome may be used to obtain a viable virus which is capable of expressing the polypeptide in infected host cells (Logan, J. and Shenk, T. (1984) Proc. Natl. Acad. Sci. 81:3655-3659). In addition, transcription enhancers, such as the Rous sarcoma virus (RSV) enhancer, may be used to increase expression in mammalian host cells.

[0574] Specific initiation signals may also be used to achieve more efficient translation of sequences encoding a polypeptide of interest. Such signals include the ATG initiation codon and adjacent sequences. In cases where sequences encoding the polypeptide, its initiation codon, and upstream sequences are inserted into the appropriate expression vector, no additional transcriptional or translational control signals may be needed. However, in cases where only coding sequence, or a portion thereof, is inserted, exogenous translational control signals including the ATG initiation codon should be provided. Furthermore, the initiation codon should be in the correct reading frame to ensure translation of the entire insert. Exogenous translational elements and initiation codons may be of various origins, both natural and synthetic. The efficiency of expression may be enhanced by the inclusion of enhancers which are appropriate for the particular cell system which is used, such as those described in the literature (Scharf, D. et al. (1994) Results Probl. Cell Differ. 20:125-162).

[0575] In addition, a host cell strain may be chosen for its ability to modulate the expression of the inserted sequences or to process the expressed protein in the desired fashion. Such modifications of the polypeptide include, but are not limited to, acetylation, carboxylation. glycosylation, phosphorylation, lipidation, and acylation. Post-translational processing which cleaves a “prepro” form of the protein may also be used to facilitate correct insertion, folding and/or function. Different host cells such as CHO, COS, HeLa, MDCK, HEK293, and W138, which have specific cellular machinery and characteristic mechanisms for such post-translational activities, may be chosen to ensure the correct modification and processing of the foreign protein.

[0576] For long-term, high-yield production of recombinant proteins, stable expression is generally preferred. For example, cell lines which stably express a polynucleotide of interest may be transformed using expression vectors which may contain viral origins of replication and/or endogenous expression elements and a selectable marker gene on the same or on a separate vector. Following the introduction of the vector, cells may be allowed to grow for 1-2 days in an enriched media before they are switched to selective media. The purpose of the selectable marker is to confer resistance to selection, and its presence allows growth and recovery of cells which successfully express the introduced sequences. Resistant clones of stably transformed cells may be proliferated using tissue culture techniques appropriate to the cell type.

[0577] Any number of selection systems may be used to recover transformed cell lines. These include, but are not limited to, the herpes simplex virus thymidine kinase (Wigler, M. et al. (1977) Cell 11:223-32) and adenine phosphoribosyltransferase (Lowy, I. et al. (1990) Cell 22:817-23) genes which can be employed in tk.sup.- or aprt.sup.- cells, respectively. Also, antimetabolite, antibiotic or herbicide resistance can be used as the basis for selection; for example, dhfr which confers resistance to methotrexate (Wigler, M. et al. (1980) Proc. Natl. Acad. Sci. 77:3567-70); npt, which confers resistance to the aminoglycosides, neomycin and G-418 (Colbere-Garapin, F. et al (1981) J. Mol. Biol. 150:1-14); and als or pat, which confer resistance to chlorsulfuron and phosphinotricin acetyltransferase, respectively (Murry, supra). Additional selectable genes have been described, for example, trpB, which allows cells to utilize indole in place of tryptophan, or hisD, which allows cells to utilize histinol in place of histidine (Hartman, S.C. and R. C. Mulligan (1988) Proc. Natl. Acad. Sci. 85:8047-51). The use of visible markers has gained popularity with such markers as anthocyanins, beta-glucuronidase and its substrate GUS, and luciferase and its substrate luciferin, being widely used not only to identify transformants, but also to quantify the amount of transient or stable protein expression attributable to a specific vector system (Rhodes, C. A. et al. (1995) Methods Mol. Biol. 55:121-131).

[0578] Although the presence/absence of marker gene expression suggests that the gene of interest is also present, its presence and expression may need to be confirmed. For example, if the sequence encoding a polypeptide is inserted within a marker gene sequence, recombinant cells containing sequences can be identified by the absence of marker gene function. Alternatively, a marker gene can be placed in tandem with a polypeptide-encoding sequence under the control of a single promoter. Expression of the marker gene in response to induction or selection usually indicates expression of the tandem gene as well.

[0579] Alternatively, host cells that contain and express a desired polynucleotide sequence may be identified by a variety of procedures known to those of skill in the art. These procedures include, but are not limited to, DNA-DNA or DNA-RNA hybridizations and protein bioassay or immunoassay techniques which include, for example, membrane, solution, or chip based technologies for the detection and/or quantification of nucleic acid or protein.

[0580] A variety of protocols for detecting and measuring the expression of polynucleotide-encoded products, using either polyclonal or monoclonal antibodies specific for the product are known in the art. Examples include enzyme-linked immunosorbent assay (ELISA), radioimmunoassay (RIA), and fluorescence activated cell sorting (FACS). A two-site, monoclonal-based immunoassay utilizing monoclonal antibodies reactive to two non-interfering epitopes on a given polypeptide may be preferred for some applications, but a competitive binding assay may also be employed. These and other assays are described, among other places, in Hampton, R. et al. (1990; Serological Methods, a Laboratory Manual, APS Press, St Paul. Minn.) and Maddox, D. E. et al. (1983; J. Exp. Med. 158:1211-1216).

[0581] A wide variety of labels and conjugation techniques are known by those skilled in the art and may be used in various nucleic acid and amino acid assays. Means for producing labeled hybridization or PCR probes for detecting sequences related to polynucleotides include oligolabeling, nick translation, end-labeling or PCR amplification using a labeled nucleotide. Alternatively, the sequences, or any portions thereof may be cloned into a vector for the production of an mRNA probe. Such vectors are known in the art, are commercially available, and may be used to synthesize RNA probes in vitro by addition of an appropriate RNA polymerase such as T7, T3, or SP6 and labeled nucleotides. These procedures may be conducted using a variety of commercially available kits. Suitable reporter molecules or labels, which may be used include radionuclides, enzymes, fluorescent, chemiluminescent, or chromogenic agents as well as substrates, cofactors, inhibitors, magnetic particles, and the like.

[0582] Host cells transformed with a polynucleotide sequence of interest may be cultured under conditions suitable for the expression and recovery of the protein from cell culture. The protein produced by a recombinant cell may be secreted or contained intracellularly depending on the sequence and/or the vector used. As will be understood by those of skill in the art, expression vectors containing polynucleotides of the invention may be designed to contain signal sequences which direct secretion of the encoded polypeptide through a prokaryotic or eukaryotic cell membrane. Other recombinant constructions may be used to join sequences encoding a polypeptide of interest to nucleotide sequence encoding a polypeptide domain which will facilitate purification of soluble proteins. Such purification facilitating domains include, but are not limited to, metal chelating peptides such as histidine-tryptophan modules that allow purification on immobilized metals, protein A domains that allow purification on immobilized immunoglobulin, and the domain utilized in the FLAGS extension/affinity purification system (Immunex Corp., Seattle, Wash.). The inclusion of cleavable linker sequences such as those specific for Factor XA or enterokinase (Invitrogen. San Diego, Calif.) between the purification domain and the encoded polypeptide may be used to facilitate purification. One such expression vector provides for expression of a fusion protein containing a polypeptide of interest and a nucleic acid encoding 6 histidine residues preceding a thioredoxin or an enterokinase cleavage site. The histidine residues facilitate purification on IMIAC (immobilized metal ion affinity chromatography) as described in Porath, J. et al. (1992, Prot. Exp. Purif 3:263-281) while the enterokinase cleavage site provides a means for purifying the desired polypeptide from the fusion protein. A discussion of vectors which contain fusion proteins is provided in Kroll, D. J. et al. (1993; DNA Cell Biol. 12:441-453).

[0583] In addition to recombinant production methods, polypeptides of the invention, and fragments thereof, may be produced by direct peptide synthesis using solid-phase techniques (Merrifield J. (1963) J. Am. Chem. Soc. 85:2149-2154). Protein synthesis may be performed using manual techniques or by automation. Automated synthesis may be achieved, for example, using Applied Biosystems 431 A Peptide Synthesizer (Perkin Elmer). Alternatively, various fragments may be chemically synthesized separately and combined using chemical methods to produce the full length molecule.

[0584] Antibody Compositions Fragments Thereof and Other Binding Agents

[0585] According to another aspect, the present invention further provides binding agents, such as antibodies and antigen-binding fragments thereof, that exhibit immunological binding to a tumor polypeptide disclosed herein, or to a portion, variant or derivative thereof. An antibody, or antigen-binding fragment thereof, is said to “specifically bind,” “immunogically bind,” and/or is “immunologically reactive” to a polypeptide of the invention if it reacts at a detectable level (within, for example, an ELISA assay) with the polypeptide, and does not react detectably with unrelated polypeptides under similar conditions.

[0586] Immunological binding, as used in this context, generally refers to the non-covalent interactions of the type which occur between an immunoglobulin molecule and an antigen for which the immunoglobulin is specific. The strength, or affinity of immunological binding interactions can be expressed in terms of the dissociation constant (K_{d}) of the interaction, wherein a smaller K_{d} represents a greater affinity. Immunological binding properties of selected polypeptides can be quantified using methods well known in the art. One such method entails measuring the rates of antigen-binding site/antigen complex formation and dissociation, wherein those rates depend on the concentrations of the complex partners, the affinity of the interaction, and on geometric parameters that equally influence the rate in both directions. Thus, both the “on rate constant” (Kₒₙ) and the “off rate constant” (K_{off}) can be determined by calculation of the concentrations and the actual rates of association and dissociation. The ratio of K_{off}/Kₒₙ enables cancellation of all parameters not related to affinity, and is thus equal to the dissociation constant K_{d}. See, generally, Davies et al. (1990) Annual Rev. Biochem. 59:439-473.

[0587] An “antigen-binding site,” or “binding portion” of an antibody refers to the part of the immunoglobulin molecule that participates in antigen binding. The antigen binding site is formed by amino acid residues of the N-terminal variable (“V”) regions of the heavy (“H”) and light (“L”) chains. Three highly divergent stretches within the V regions of the heavy and light chains are referred to as “hypervariable regions” which are interposed between more conserved flanking stretches known as “framework regions,” or “FRs”. Thus the term “FR” refers to amino acid sequences which are naturally found between and adjacent to hypervariable regions in immunoglobulins. In an antibody molecule, the three hypervariable regions of a light chain and the three hypervariable regions of a heavy chain are disposed relative to each other in three dimensional space to form an antigen-binding surface. The antigen-binding surface is complementary to the three-dimensional surface of a bound antigen, and the three hypervariable regions of each of the heavy and light chains are referred to as “complementarity-determining regions,” or “CDRs.”

[0588] Binding agents may be further capable of differentiating between patients with and without a cancer, such as lung cancer, using the representative assays provided herein. For example, antibodies or other binding agents that bind to a tumor protein will preferably generate a signal indicating the presence of a cancer in at least about 20% of patients with the disease, more preferably at least about 30% of patients. Alternatively, or in addition, the antibody will generate a negative signal indicating the absence of the disease in at least about 90% of individuals without the cancer. To determine whether a binding agent satisfies this requirement, biological samples (e.g., blood, sera, sputum, urine and/or tumor biopsies) from patients with and without a cancer (as determined using standard clinical tests) may be assayed as described herein for the presence of polypeptides that bind to the binding agent. Preferably, a statistically significant number of samples with and without the disease will be assayed. Each binding agent should satisfy the above criteria; however, those of ordinary skill in the art will recognize that binding agents may be used in combination to improve sensitivity.

[0589] Any agent that satisfies the above requirements may be a binding agent. For example, a binding agent may be a ribosome, with or without a peptide component, an RNA molecule or a polypeptide. In a preferred embodiment, a binding agent is an antibody or an antigen-binding fragment thereof. Antibodies may be prepared by any of a variety of techniques known to those of ordinary skill in the art. See, e.g., Harlow and Lane, Antibodies: A Laboratory Manual, Cold Spring Harbor Laboratory, 1988. In general, antibodies can be produced by cell culture techniques, including the generation of monoclonal antibodies as described herein, or via transfection of antibody genes into suitable bacterial or mammalian cell hosts, in order to allow for the production of recombinant antibodies. In one technique, an immunogen comprising the polypeptide is initially injected into any of a wide variety of mammals (e.g., mice, rats, rabbits, sheep or goats). In this step, the polypeptides of this invention may serve as the immunogen without modification. Alternatively, particularly for relatively short polypeptides, a superior immune response may be elicited if the polypeptide is joined to a carrier protein, such as bovine serum albumin or keyhole limpet hemocyanin. The immunogen is injected into the animal host, preferably according to a predetermined schedule incorporating one or more booster immunizations, and the animals are bled periodically. Polyclonal antibodies specific for the polypeptide may then be purified from such antisera by, for example, affinity chromatography using the polypeptide coupled to a suitable solid support.

[0590] Monoclonal antibodies specific for an antigenic polypeptide of interest may be prepared, for example, using the technique of Kohler and Milstein, Eur. J. Immunol. 6:511-519, 1976, and improvements thereto. Briefly, these methods involve the preparation of immortal cell lines capable of producing antibodies having the desired specificity (i.e., reactivity with the polypeptide of interest). Such cell lines may be produced, for example, from spleen cells obtained from an animal immunized as described above. The spleen cells are then immortalized by, for example, fusion with a myeloma cell fusion partner, preferably one that is syngeneic with the immunized animal. A variety of fusion techniques may be employed. For example, the spleen cells and myeloma cells may be combined with a nonionic detergent for a few minutes and then plated at low density on a selective medium that supports the growth of hybrid cells, but not myeloma cells. A preferred selection technique uses HAT (hypoxanthine, aminopterin, thymidine) selection. After a sufficient time, usually about 1 to 2 weeks, colonies of hybrids are observed. Single colonies are selected and their culture supernatants tested for binding activity against the polypeptide. Hybridomas having high reactivity and specificity are preferred.

[0591] Monoclonal antibodies may be isolated from the supernatants of growing hybridoma colonies. In addition, various techniques may be employed to enhance the yield, such as injection of the hybridoma cell line into the peritoneal cavity of a suitable vertebrate host, such as a mouse. Monoclonal antibodies may then be harvested from the ascites fluid or the blood. Contaminants may be removed from the antibodies by conventional techniques, such as chromatography, gel filtration, precipitation, and extraction. The polypeptides of this invention may be used in the purification process in, for example, an affinity chromatography step.

[0592] A number of therapeutically useful molecules are known in the art which comprise antigen-binding sites that are capable of exhibiting immunological binding properties of an antibody molecule. The proteolytic enzyme papain preferentially cleaves IgG molecules to yield several fragments, two of which (the “F(ab)” fragments) each comprise a covalent heterodimer that includes an intact antigen-binding site. The enzyme pepsin is able to cleave IgG molecules to provide several fragments, including the “F(ab′)₂” fragment which comprises both antigen-binding sites. An “Fv” fragment can be produced by preferential proteolytic cleavage of an IgM, and on rare occasions IgG or IgA immunoglobulin molecule. Fv fragments are, however, more commonly derived using recombinant techniques known in the art. The Fv fragment includes a non-covalent V_{H}::V_{L}heterodimer including an antigen-binding site which retains much of the antigen recognition and binding capabilities of the native antibody molecule. Inbar et al. (1972) Proc. Nat. Acad. Sci. USA 69:2659-2662; Hochman et al. (1976) Biochem 15:2706-2710; and Ehrlich et al. (1980) Biochem 19:4091-4096.

[0593] A single chain Fv (“sFv”) polypeptide is a covalently linked V_{H}::V_{L}heterodimer which is expressed from a gene fusion including V_{H} and V_{L}-encoding genes linked by a peptide-encoding linker. Huston et al. (1988) Proc. Nat. Acad. Sci. USA 85(16):5879-5883. A number of methods have been described to discern chemical structures for converting the naturally aggregated—but chemically separated—light and heavy polypeptide chains from an antibody V region into an sFv molecule which will fold into a three dimensional structure substantially similar to the structure of an antigen-binding site. See, e.g., U.S. Pat. Nos. 5,091,513 and 5,132,405, to Huston et al.; and U.S. Pat. No. 4,946,778, to Ladner et al.

[0594] Each of the above-described molecules includes a heavy chain and a light chain CDR set, respectively interposed between a heavy chain and a light chain FR set which provide support to the CDRS and define the spatial relationship of the CDRs relative to each other. As used herein, the term “CDR set” refers to the three hypervariable regions of a heavy or light chain V region. Proceeding from the N-terminus of a heavy or light chain, these regions are denoted as “CDR1,” “CDR2,” and “CDR3” respectively. An antigen-binding site, therefore, includes six CDRs, comprising the CDR set from each of a heavy and a light chain V region. A polypeptide comprising a single CDR, (e.g., a CDR1, CDR2 or CDR3) is referred to herein as a “molecular recognition unit.” Crystallographic analysis of a number of antigen-antibody complexes has demonstrated that the amino acid residues of CDRs form extensive contact with bound antigen, wherein the most extensive antigen contact is with the heavy chain CDR3. Thus, the molecular recognition units are primarily responsible for the specificity of an antigen-binding site.

[0595] As used herein, the term “FR set” refers to the four flanking amino acid sequences which frame the CDRs of a CDR set of a heavy or light chain V region. Some FR residues may contact bound antigen; however, FRs are primarily responsible for folding the V region into the antigen-binding site, particularly the FR residues directly adjacent to the CDRS. Within FRs, certain amino residues and certain structural features are very highly conserved. In this regard, all V region sequences contain an internal disulfide loop of around 90 amino acid residues. When the V regions fold into a binding-site, the CDRs are displayed as projecting loop motifs which form an antigen-binding surface. It is generally recognized that there are conserved structural regions of FRs which influence the folded shape of the CDR loops into certain “canonical” structures—regardless of the precise CDR amino acid sequence. Further, certain FR residues are known to participate in non-covalent interdomain contacts which stabilize the interaction of the antibody heavy and light chains.

[0596] A number of “humanized” antibody molecules comprising an antigen-binding site derived from a non-human immunoglobulin have been described, including chimeric antibodies having rodent V regions and their associated CDRs fused to human constant domains (Winter et al. (1991) Nature 349:293-299; Lobuglio et al. (1989) Proc. Nat. Acad. Sci. USA 86:4220-4224; Shaw et al. (1987) J. Immunol. 138:4534-4538; and Brown et al. (1987) Cancer Res. 47:3577-3583), rodent CDRs grafted into a human supporting FR prior to fusion with an appropriate human antibody constant domain (Riechmann et al. (1988) Nature 332:323-327; Verhoeyen et al. (1988) Science 239:1534-1536; and Jones et al. (1986) Nature 321:522-525), and rodent CDRs supported by recombinantly veneered rodent FRs (European Patent Publication No. 519,596, published Dec. 23, 1992). These “humanized” molecules are designed to minimize unwanted immunological response toward rodent antihuman antibody molecules which limits the duration and effectiveness of therapeutic applications of those moieties in human recipients.

[0597] As used herein, the terms “veneered FRs” and “recombinantly veneered FRs” refer to the selective replacement of FR residues from, e.g., a rodent heavy or light chain V region, with human FR residues in order to provide a xenogeneic molecule comprising an antigen-binding site which retains substantially all of the native FR polypeptide folding structure. Veneering techniques are based on the understanding that the ligand binding characteristics of an antigen-binding site are determined primarily by the structure and relative disposition of the heavy and light chain CDR sets within the antigen-binding surface. Davies et al. (1990) Ann. Rev. Biochem. 59:439-473. Thus, antigen binding specificity can be preserved in a humanized antibody only wherein the CDR structures, their interaction with each other, and their interaction with the rest of the V region domains are carefully maintained. By using veneering techniques, exterior (e.g., solvent-accessible) FR residues which are readily encountered by the immune system are selectively replaced with human residues to provide a hybrid molecule that comprises either a weakly immunogenic, or substantially non-immunogenic veneered surface.

[0598] The process of veneering makes use of the available sequence data for human antibody variable domains compiled by Kabat et al., in Sequences of Proteins of Immunological Interest, 4th ed., (U.S. Dept. of Health and Human Services, U.S. Government Printing Office, 1987), updates to the Kabat database, and other accessible U.S. and foreign databases (both nucleic acid and protein). Solvent accessibilities of V region amino acids can be deduced from the known three-dimensional structure for human and murine antibody fragments. There are two general steps in veneering a murine antigen-binding site. Initially, the FRs of the variable domains of an antibody molecule of interest are compared with corresponding FR sequences of human variable domains obtained from the above-identified sources. The most homologous human V regions are then compared residue by residue to corresponding murine amino acids. The residues in the murine FR which differ from the human counterpart are replaced by the residues present in the human moiety using recombinant techniques well known in the art. Residue switching is only carried out with moieties which are at least partially exposed (solvent accessible), and care is exercised in the replacement of amino acid residues which may have a significant effect on the tertiary structure of V region domains, such as proline, glycine and charged amino acids.

[0599] In this manner, the resultant “veneered” murine antigen-binding sites are thus designed to retain the murine CDR residues, the residues substantially adjacent to the CDRs, the residues identified as buried or mostly buried (solvent inaccessible), the residues believed to participate in non-covalent (e.g., electrostatic and hydrophobic) contacts between heavy and light chain domains, and the residues from conserved structural regions of the FRs which are believed to influence the “canonical” tertiary structures of the CDR loops. These design criteria are then used to prepare recombinant nucleotide sequences which combine the CDRs of both the heavy and light chain of a murine antigen-binding site into human-appearing FRs that can be used to transfect mammalian cells for the expression of recombinant human antibodies which exhibit the antigen specificity of the murine antibody molecule.

[0600] In another embodiment of the invention, monoclonal antibodies of the present invention may be coupled to one or more therapeutic agents. Suitable agents in this regard include radionuclides, differentiation inducers, drugs, toxins, and derivatives thereof Preferred radionuclides include ⁹⁰Y, ¹²³I, ¹²⁵I, ¹³¹I, ¹⁸⁶Re, ¹⁸⁸Re, ²¹¹At, and ²¹²Bi. Preferred drugs include methotrexate, and pyrimidine and purine analogs. Preferred differentiation inducers include phorbol esters and butyric acid. Preferred toxins include ricin, abrin, diptheria toxin, cholera toxin, gelonin, Pseudomonas exotoxin, Shigella toxin, and pokeweed antiviral protein.

[0601] A therapeutic agent may be coupled (e.g., covalently bonded) to a suitable monoclonal antibody either directly or indirectly (e.g., via a linker group). A direct reaction between an agent and an antibody is possible when each possesses a substituent capable of reacting with the other. For example, a nucleophilic group, such as an amino or sulfhydryl group, on one may be capable of reacting with a carbonyl-containing group, such as an anhydride or an acid halide, or with an alkyl group containing a good leaving group (e.g., a halide) on the other.

[0602] Alternatively, it may be desirable to couple a therapeutic agent and an antibody via a linker group. A linker group can function as a spacer to distance an antibody from an agent in order to avoid interference with binding capabilities. A linker group can also serve to increase the chemical reactivity of a substituent on an agent or an antibody, and thus increase the coupling efficiency. An increase in chemical reactivity may also facilitate the use of agents, or functional groups on agents, which otherwise would not be possible.

[0603] It will be evident to those skilled in the art that a variety of bifunctional or polyfunctional reagents, both homo- and hetero-functional (such as those described in the catalog of the Pierce Chemical Co., Rockford, Ill.), may be employed as the linker group. Coupling may be effected, for example, through amino groups, carboxyl groups, sulfhydryl groups or oxidized carbohydrate residues. There are numerous references describing such methodology, e.g., U.S. Pat. No. 4,671,958, to Rodwell et al.

[0604] Where a therapeutic agent is more potent when free from the antibody portion of the immunoconjugates of the present invention, it may be desirable to use a linker group which is cleavable during or upon internalization into a cell. A number of different cleavable linker groups have been described. The mechanisms for the intracellular release of an agent from these linker groups include cleavage by reduction of a disulfide bond (e.g., U.S. Pat. No. 4,489,710, to Spitler), by irradiation of a photolabile bond (e.g., U.S. Pat. No. 4,625,014, to Senter et al.), by hydrolysis of derivatized amino acid side chains (e.g., U.S. Pat. No. 4,638,045, to Kohn et al.), by serum complement-mediated hydrolysis (e.g., U.S. Pat. No. 4,671,958, to Rodwell et al.), and acid-catalyzed hydrolysis (e.g., U.S. Pat. No. 4,569,789, to Blattler et al.).

[0605] It may be desirable to couple more than one agent to an antibody. In one embodiment, multiple molecules of an agent are coupled to one antibody molecule. In another embodiment, more than one type of agent may be coupled to one antibody. Regardless of the particular embodiment, immunoconjugates with more than one agent may be prepared in a variety of ways. For example, more than one agent may be coupled directly to an antibody molecule, or linkers that provide multiple sites for attachment can be used. Alternatively, a carrier can be used.

[0606] A carrier may bear the agents in a variety of ways, including covalent bonding either directly or via a linker group. Suitable carriers include proteins such as albumins (e.g., U.S. Pat. No. 4,507,234, to Kato et al.), peptides and polysaccharides such as aminodextran (e.g., U.S. Pat. No. 4,699,784, to Shih et al.). A carrier may also bear an agent by noncovalent bonding or by encapsulation, such as within a liposome vesicle (e.g., U.S. Pat. Nos. 4,429,008 and 4,873,088). Carriers specific for radionuclide agents include radiohalogenated small molecules and chelating compounds. For example, U.S. Pat. No. 4,735,792 discloses representative radiohalogenated small molecules and their synthesis. A radionuclide chelate may be formed from chelating compounds that include those containing nitrogen and sulfur atoms as the donor atoms for binding the metal, or metal oxide, radionuclide. For example, U.S. Pat. No. 4,673,562, to Davison et al. discloses representative chelating compounds and their synthesis.

[0607] T Cell Compositions

[0608] The present invention, in another aspect, provides T cells specific for a tumor polypeptide disclosed herein, or for a variant or derivative thereof. Such cells may generally be prepared in vitro or ex vivo using standard procedures. For example, T cells may be isolated from bone marrow, peripheral blood, or a fraction of bone marrow or peripheral blood of a patient, using a commercially available cell separation system, such as the Isolex™ System, available from Nexell Therapeutics, Inc. (Irvine, Calif.; see also U.S. Pat. No. 5,240,856; U.S. Pat. No. 5,215,926; WO 89/06280; WO 91/16116 and WO 92/07243). Alternatively, T cells may be derived from related or unrelated humans, non-human mammals, cell lines or cultures.

[0609] T cells may be stimulated with a polypeptide, polynucleotide encoding a polypeptide and/or an antigen presenting cell (APC) that expresses such a polypeptide. Such stimulation is performed under conditions and for a time sufficient to permit the generation of T cells that are specific for the polypeptide of interest. Preferably, a tumor polypeptide or polynucleotide of the invention is present within a delivery vehicle, such as a microsphere, to facilitate the generation of specific T cells.

[0610] T cells are considered to be specific for a polypeptide of the present invention if the T cells specifically proliferate, secrete cytokines or kill target cells coated with the polypeptide or expressing a gene encoding the polypeptide. T cell specificity may be evaluated using any of a variety of standard techniques. For example, within a chromium release assay or proliferation assay, a stimulation index of more than two fold increase in lysis and/or proliferation, compared to negative controls, indicates T cell specificity. Such assays may be performed, for example, as described in Chen et al., Cancer Res. 54:1065-1070, 1994. Alternatively, detection of the proliferation of T cells may be accomplished by a variety of known techniques. For example, T cell proliferation can be detected by measuring an increased rate of DNA synthesis (e.g., by pulse-labeling cultures of T cells with tritiated thymidine and measuring the amount of tritiated thymidine incorporated into DNA). Contact with a tumor polypeptide (100 ng/ml −100 μg/ml, preferably 200 ng/ml −25 μg/ml) for 3-7 days will typically result in at least a two fold increase in proliferation of the T cells. Contact as described above for 2-3 hours should result in activation of the T cells, as measured using standard cytokine assays in which a two fold increase in the level of cytokine release (e.g., TNF or IFN-γ) is indicative of T cell activation (see Coligan et al., Current Protocols in Immunology, vol. 1, Wiley Interscience (Greene 1998)). T cells that have been activated in response to a tumor polypeptide, polynucleotide or polypeptide-expressing APC may be CD4⁺ and/or CD8⁺. Tumor polypeptide-specific T cells may be expanded using standard techniques. Within preferred embodiments, the T cells are derived from a patient, a related donor or an unrelated donor, and are administered to the patient following stimulation and expansion.

[0611] For therapeutic purposes, CD4⁺ or CD8⁺ T cells that proliferate in response to a tumor polypeptide, polynucleotide or APC can be expanded in number either in vitro or in vivo. Proliferation of such T cells in vitro may be accomplished in a variety of ways. For example, the T cells can be re-exposed to a tumor polypeptide, or a short peptide corresponding to an immunogenic portion of such a polypeptide, with or without the addition of T cell growth factors, such as interleukin-2, and/or stimulator cells that synthesize a tumor polypeptide. Alternatively, one or more T cells that proliferate in the presence of the tumor polypeptide can be expanded in number by cloning. Methods for cloning cells are well known in the art, and include limiting dilution.

[0612] T Cell Receptor Compositions

[0613] The T cell receptor (TCR) consists of 2 different, highly variable polypeptide chains, termed the T-cell receptor α and β chains, that are linked by a disulfide bond (Janeway, Travers, Walport. Immunobiology. Fourth Ed., 148-159. Elsevier Science Ltd/Garland Publishing. 1999). The α/β heterodimer complexes with the invariant CD3 chains at the cell membrane. This complex recognizes specific antigenic peptides bound to MHC molecules. The enormous diversity of TCR specificities is generated much like immunoglobulin diversity, through somatic gene rearrangement. The P chain genes contain over 50 variable (V), 2 diversity (D), over 10 joining (J) segments, and 2 constant region segments (C). The α chain genes contain over 70 V segments, and over 60 J segments but no D segments, as well as one C segment. During T cell development in the thymus, the D to J gene rearrangement of the β chain occurs, followed by the V gene segment rearrangement to the DJ. This functional VDJ_{β} exon is transcribed and spliced to join to a C_{β}. For the α chain, a V_{α} gene segment rearranges to a J_{α} gene segment to create the functional exon that is then transcribed and spliced to the C_{α}. Diversity is further increased during the recombination process by the random addition of P and N-nucleotides between the V, D, and J segments of the β chain and between the V and J segments in the α chain (Janeway, Travers, Walport. Immunobiology. Fourth Ed., 98 and 150. Elsevier Science Ltd/Garland Publishing. 1999).

[0614] The present invention, in another aspect, provides TCRs specific for a polypeptide disclosed herein, or for a variant or derivative thereof. In accordance with the present invention, polynucleotide and amino acid sequences are provided for the V-J or V-D-J junctional regions or parts thereof for the alpha and beta chains of the T-cell receptor which recognize tumor polypeptides described herein. In general, this aspect of the invention relates to T-cell receptors which recognize or bind tumor polypeptides presented in the context of MHC. In a preferred embodiment the tumor antigens recognized by the T-cell receptors comprise a polypeptide of the present invention. For example, cDNA encoding a TCR specific for a_tumor peptide can be isolated from T cells specific for a tumor polypeptide using standard molecular biological and recombinant DNA techniques.

[0615] This invention further includes the T-cell receptors or analogs thereof having substantially the same function or activity as the T-cell receptors of this invention which recognize or bind tumor polypeptides. Such receptors include, but are not limited to, a fragment of the receptor, or a substitution, addition or deletion mutant of a T-cell receptor provided herein. This invention also encompasses polypeptides or peptides that are substantially homologous to the T-cell receptors provided herein or that retain substantially the same activity. The term “analog” includes any protein or polypeptide having an amino acid residue sequence substantially identical to the T-cell receptors provided herein in which one or more residues, preferably no more than 5 residues, more preferably no more than 25 residues have been conservatively substituted with a functionally similar residue and which displays the functional aspects of the T-cell receptor as described herein.

[0616] The present invention further provides for suitable mammalian host cells, for example, non-specific T cells, that are transfected with a polynucleotide encoding TCRs specific for a polypeptide described herein, thereby rendering the host cell specific for the polypeptide. The α and β chains of the TCR may be contained on separate expression vectors or alternatively, on a single expression vector that also contains an internal ribosome entry site (IRES) for cap-independent translation of the gene downstream of the IRES. Said host cells expressing TCRs specific for the polypeptide may be used, for example, for adoptive immunotherapy of lung cancer as discussed further below.

[0617] In further aspects of the present invention, cloned TCRs specific for a polypeptide recited herein may be used in a kit for the diagnosis of lung cancer. For example, the nucleic acid sequence or portions thereof, of tumor-specific TCRs can be used as probes or primers for the detection of expression of the rearranged genes encoding the specific TCR in a biological sample. Therefore, the present invention further provides for an assay for detecting messenger RNA or DNA encoding the TCR specific for a polypeptide.

[0618] Pharmaceutical Compositions

[0619] In additional embodiments, the present invention concerns formulation of one or more of the polynucleotide, polypeptide, T-cell and/or antibody compositions disclosed herein in pharmaceutically-acceptable carriers for administration to a cell or an animal, either alone, or in combination with one or more other modalities of therapy.

[0620] It will be understood that, if desired, a composition as disclosed herein may be administered in combination with other agents as well, such as, e.g., other proteins or polypeptides or various pharmaceutically-active agents. In fact, there is virtually no limit to other components that may also be included, given that the additional agents do not cause a significant adverse effect upon contact with the target cells or host tissues. The compositions may thus be delivered along with various other agents as required in the particular instance. Such compositions may be purified from host cells or other biological sources, or alternatively may be chemically synthesized as described herein. Likewise, such compositions may further comprise substituted or derivatized RNA or DNA compositions.

[0621] Therefore, in another aspect of the present invention, pharmaceutical compositions are provided comprising one or more of the polynucleotide, polypeptide, antibody, and/or T-cell compositions described herein in combination with a physiologically acceptable carrier. In certain preferred embodiments, the pharmaceutical compositions of the invention comprise immunogenic polynucleotide and/or polypeptide compositions of the invention for use in prophylactic and theraputic vaccine applications. Vaccine preparation is generally described in, for example, M. F. Powell and M. J. Newman, eds., “Vaccine Design (the subunit and adjuvant approach),” Plenum Press (NY, 1995). Generally, such compositions will comprise one or more polynucleotide and/or polypeptide compositions of the present invention in combination with one or more immunostimulants.

[0622] It will be apparent that any of the pharmaceutical compositions described herein can contain pharmaceutically acceptable salts of the polynucleotides and polypeptides of the invention. Such salts can be prepared, for example, from pharmaceutically acceptable non-toxic bases, including organic bases (e.g., salts of primary, secondary and tertiary amines and basic amino acids) and inorganic bases (e.g., sodium, potassium, lithium, ammonium, calcium and magnesium salts).

[0623] In another embodiment, illustrative immunogenic compositions, e.g., vaccine compositions, of the present invention comprise DNA encoding one or more of the polypeptides as described above, such that the polypeptide is generated in situ. As noted above, the polynucleotide may be administered within any of a variety of delivery systems known to those of ordinary skill in the art. Indeed, numerous gene delivery techniques are well known in the art, such as those described by Rolland, Crit. Rev. Therap. Drug Carrier Systems 15:143-198, 1998, and references cited therein. Appropriate polynucleotide expression systems will, of course, contain the necessary regulatory DNA regulatory sequences for expression in a patient (such as a suitable promoter and terminating signal). Alternatively, bacterial delivery systems may involve the administration of a bacterium (such as Bacillus-Calmette-Guerrin) that expresses an immunogenic portion of the polypeptide on its cell surface or secretes such an epitope.

[0624] Therefore, in certain embodiments, polynucleotides encoding immunogenic polypeptides described herein are introduced into suitable mammalian host cells for expression using any of a number of known viral-based systems. In one illustrative embodiment, retroviruses provide a convenient and effective platform for gene delivery systems. A selected nucleotide sequence encoding a polypeptide of the present invention can be inserted into a vector and packaged in retroviral particles using techniques known in the art. The recombinant virus can then be isolated and delivered to a subject. A number of illustrative retroviral systems have been described (e.g., U.S. Pat. No. 5,219,740; Miller and Rosman (1989) BioTechniques 7:980-990; Miller, A. D. (1990) Human Gene Therapy 1:5-14; Scarpa et al. (1991) Virology 180:849-852; Burns et al. (1993) Proc. Natl. Acad. Sci. USA 90:8033-8037; and Boris-Lawrie and Temin (1993) Cur. Opin. Genet. Develop. 3:102-109.

[0625] In addition, a number of illustrative adenovirus-based systems have also been described. Unlike retroviruses which integrate into the host genome, adenoviruses persist extrachromosomally thus minimizing the risks associated with insertional mutagenesis (Haj-Ahmad and Graham (1986) J. Virol. 57:267-274; Bett et al. (1993) J. Virol. 67:5911-5921; Mittereder et al. (1994) Human Gene Therapy 5:717-729; Seth et al. (1994) J. Virol. 68:933-940; Barr et al. (1994) Gene Therapy 1:51-58; Berkner, K. L. (1988) BioTechniques 6:616-629; and Rich et al. (1993) Human Gene Therapy 4:461-476).

[0626] Various adeno-associated virus (AAV) vector systems have also been developed for polynucleotide delivery. AAV vectors can be readily constructed using techniques well known in the art. See, e.g., U.S. Pat. Nos. 5,173,414 and 5,139,941; International Publication Nos. WO 92/01070 and WO 93/03769; Lebkowski et al. (1988) Molec. Cell. Biol. 8:3988-3996; Vincent et al. (1990) Vaccines 90 (Cold Spring Harbor Laboratory Press); Carter, B. J. (1992) Current Opinion in Biotechnology 3:533-539; Muzyczka, N. (1992) Current Topics in Microbiol. and Immunol. 158:97-129; Kotin, R. M. (1994) Human Gene Therapy 5:793-801; Shelling and Smith (1994) Gene Therapy 1:165-169; and Zhou et al. (1994) J. Exp. Med. 179:1867-1875.

[0627] Additional viral vectors useful for delivering the polynucleotides encoding polypeptides of the present invention by gene transfer include those derived from the pox family of viruses, such as vaccinia virus and avian poxyirus. By way of example, vaccinia virus recombinants expressing the novel molecules can be constructed as follows. The DNA encoding a polypeptide is first inserted into an appropriate vector so that it is adjacent to a vaccinia promoter and flanking vaccinia DNA sequences, such as the sequence encoding thymidine kinase (TK) This vector is then used to transfect cells which are simultaneously infected with vaccinia. Homologous recombination serves to insert the vaccinia promoter plus the gene encoding the polypeptide of interest into the viral genome. The resulting TK.sup.(−) recombinant can be selected by culturing the cells in the presence of 5-bromodeoxyuridine and picking viral plaques resistant thereto.

[0628] A vaccinia-based infection/transfection system can be conveniently used to provide for inducible, transient expression or coexpression of one or more polypeptides described herein in host cells of an organism. In this particular system, cells are first infected in vitro with a vaccinia virus recombinant that encodes the bacteriophage T7 RNA polymerase. This polymerase displays exquisite specificity in that it only transcribes templates bearing T7 promoters. Following infection, cells are transfected with the polynucleotide or polynucleotides of interest, driven by a T7 promoter. The polymerase expressed in the cytoplasm from the vaccinia virus recombinant transcribes the transfected DNA into RNA which is then translated into polypeptide by the host translational machinery. The method provides for high level, transient, cytoplasmic production of large quantities of RNA and its translation products. See, e.g., Elroy-Stein and Moss, Proc. Natl. Acad. Sci. USA (1990) 87:6743-6747; Fuerst et al. Proc. Natl. Acad. Sci. USA (1986) 83:8122-8126.

[0629] Alternatively, avipoxyiruses, such as the fowlpox and canarypox viruses, can also be used to deliver the coding sequences of interest. Recombinant avipox viruses, expressing immunogens from mammalian pathogens, are known to confer protective immunity when administered to non-avian species. The use of an Avipox vector is particularly desirable in human and other mammalian species since members of the Avipox genus can only productively replicate in susceptible avian species and therefore are not infective in mammalian cells. Methods for producing recombinant Avipoxyiruses are known in the art and employ genetic recombination, as described above with respect to the production of vaccinia viruses. See, e.g., WO 91/12882; WO 89/03429; and WO 92/03545.

[0630] Any of a number of alphavirus vectors can also be used for delivery of polynucleotide compositions of the present invention, such as those vectors described in U.S. Pat. Nos. 5,843,723; 6,015,686; 6,008,035 and 6,015,694. Certain vectors based on Venezuelan Equine Encephalitis (VEE) can also be used, illustrative examples of which can be found in U.S. Pat. Nos. 5,505,947 and 5,643,576.

[0631] Moreover, molecular conjugate vectors, such as the adenovirus chimeric vectors described in Michael et al. J. Biol. Chem. (1993) 268:6866-6869 and Wagner et al. Proc. Natl. Acad. Sci. USA (1992) 89:6099-6103, can also be used for gene delivery under the invention.

[0632] Additional illustrative information on these and other known viral-based delivery systems can be found, for example, in Fisher-Hoch et al., Proc. Natl. Acad. Sci. USA 86:317-321, 1989; Flexner et al., Ann. N.Y. Acad. Sci. 569:86-103, 1989; Flexner et al., Vaccine 8:17-21, 1990; U.S. Pat. Nos. 4,603,112, 4,769,330, and 5,017,487; WO 89/01973; U.S. Pat. No. 4,777,127; GB 2,200,651; EP 0,345,242; WO 91/02805; Berkner, Biotechniques 6:616-627, 1988; Rosenfeld et al., Science 252:431-434, 1991; Kolls et al., Proc. Natl. Acad. Sci. USA 91:215-219, 1994; Kass-Eisler et al., Proc. Natl. Acad. Sci. USA 90:11498-11502, 1993; Guzman et al., Circulation 88:2838-2848, 1993; and Guzman et al., Cir. Res. 73:1202-1207, 1993.

[0633] In certain embodiments, a polynucleotide may be integrated into the genome of a target cell. This integration may be in the specific location and orientation via homologous recombination (gene replacement) or it may be integrated in a random, non-specific location (gene augmentation). In yet further embodiments, the polynucleotide may be stably maintained in the cell as a separate, episomal segment of DNA. Such polynucleotide segments or “episomes” encode sequences sufficient to permit maintenance and replication independent of or in synchronization with the host cell cycle. The manner in which the expression construct is delivered to a cell and where in the cell the polynucleotide remains is dependent on the type of expression construct employed.

[0634] In another embodiment of the invention, a polynucleotide is administered/delivered as “naked” DNA, for example as described in Ulmer et al., Science 259:1745-1749, 1993 and reviewed by Cohen, Science 259:1691-1692, 1993. The uptake of naked DNA may be increased by coating the DNA onto biodegradable beads, which are efficiently transported into the cells.

[0635] In still another embodiment, a composition of the present invention can be delivered via a particle bombardment approach, many of which have been described. In one illustrative example, gas-driven particle acceleration can be achieved with devices such as those manufactured by Powderject Pharmaceuticals PLC (Oxford, UK) and Powderject Vaccines Inc. (Madison, Wis.), some examples of which are described in U.S. Pat. Nos. 5,846,796; 6,010,478; 5,865,796; 5,584,807; and EP Patent No. 0500 799. This approach offers a needle-free delivery approach wherein a dry powder formulation of microscopic particles, such as polynucleotide or polypeptide particles, are accelerated to high speed within a helium gas jet generated by a hand held device, propelling the particles into a target tissue of interest.

[0636] In a related embodiment, other devices and methods that may be useful for gas-driven needle-less injection of compositions of the present invention include those provided by Bioject, Inc. (Portland, Oreg.), some examples of which are described in U.S. Pat. Nos. 4,790,824; 5,064,413; 5,312,335; 5,383,851; 5,399,163; 5,520,639 and 5,993,412.

[0637] According to another embodiment, the pharmaceutical compositions described herein will comprise one or more immunostimulants in addition to the immunogenic polynucleotide, polypeptide, antibody, T-cell and/or APC compositions of this invention. An immunostimulant refers to essentially any substance that enhances or potentiates an immune response (antibody and/or cell-mediated) to an exogenous antigen. One preferred type of immunostimulant comprises an adjuvant. Many adjuvants contain a substance designed to protect the antigen from rapid catabolism, such as aluminum hydroxide or mineral oil, and a stimulator of immune responses, such as lipid A, Bortadella pertussis or Mycobacterium tuberculosis derived proteins. Certain adjuvants are commercially available as, for example, Freund's Incomplete Adjuvant and Complete Adjuvant (Difco Laboratories, Detroit, Mich.); Merck Adjuvant 65 (Merck and Company, Inc., Rahway, N.J.); AS-2 (SmithKline Beecham, Philadelphia, Pa.); aluminum salts such as aluminum hydroxide gel (alum) or aluminum phosphate; salts of calcium, iron or zinc; an insoluble suspension of acylated tyrosine; acylated sugars; cationically or anionically derivatized polysaccharides; polyphosphazenes; biodegradable microspheres; monophosphoryl lipid A, QS21, aminoalkyl glucosaminide 4-phosphates, and quil A. Cytokines, such as GM-CSF, interleukin-2, -7, -12, and other like growth factors, may also be used as adjuvants.

[0638] Within certain embodiments of the invention, the adjuvant composition is preferably one that induces an immune response predominantly of the Th1 type. High levels of Th1-type cytokines (e.g., IFN-γ, TNFα, IL-2 and IL-12) tend to favor the induction of cell mediated immune responses to an administered antigen. In contrast, high levels of Th2-type cytokines (e.g., IL-4, IL-5, IL-6 and IL-10) tend to favor the induction of humoral immune responses. Following application of a vaccine as provided herein, a patient will support an immune response that includes Th1- and Th2-type responses. Within a preferred embodiment, in which a response is predominantly Th1-type, the level of Th1-type cytokines will increase to a greater extent than the level of Th2-type cytokines. The levels of these cytokines may be readily assessed using standard assays. For a review of the families of cytokines, see Mosmann and Coffman, Ann. Rev. Immunol. 7:145-173, 1989.

[0639] Certain preferred adjuvants for eliciting a predominantly Th1-type response include, for example, a combination of monophosphoryl lipid A, preferably 3-de-O-acylated monophosphoryl lipid A, together with an aluminum salt. MPL® adjuvants are available from Corixa Corporation (Seattle, Wash.; see, for example, U.S. Pat. Nos. 4,436,727; 4,877,611; 4,866,034 and 4,912,094). CpG-containing oligonucleotides (in which the CpG dinucleotide is unmethylated) also induce a predominantly Th1 response. Such oligonucleotides are well known and are described, for example, in WO 96/02555, WO 99/33488 and U.S. Pat. Nos. 6,008,200 and 5,856,462. Immunostimulatory DNA sequences are also described, for example, by Sato et al., Science 273:352, 1996. Another preferred adjuvant comprises a saponin, such as Quil A, or derivatives thereof, including QS21 and QS7 (Aquila Biopharmaceuticals Inc., Framingham, Mass.); Escin; Digitonin; or Gypsophila or Chenopodium quinoa saponins. Other preferred formulations include more than one saponin in the adjuvant combinations of the present invention, for example combinations of at least two of the following group comprising QS21, QS7, Quil A, β-escin, or digitonin.

[0640] Alternatively the saponin formulations may be combined with vaccine vehicles composed of chitosan or other polycationic polymers, polylactide and polylactide-co-glycolide particles, poly-N-acetyl glucosamine-based polymer matrix, particles composed of polysaccharides or chemically modified polysaccharides, liposomes and lipid-based particles, particles composed of glycerol monoesters, etc. The saponins may also be formulated in the presence of cholesterol to form particulate structures such as liposomes or ISCOMs. Furthermore, the saponins may be formulated together with a polyoxyethylene ether or ester, in either a non-particulate solution or suspension, or in a particulate structure such as a paucilamelar liposome or ISCOM. The saponins may also be formulated with excipients such as Carbopol^{R} to increase viscosity, or may be formulated in a dry powder form with a powder excipient such as lactose.

[0641] In one preferred embodiment, the adjuvant system includes the combination of a monophosphoryl lipid A and a saponin derivative, such as the combination of QS21 and 3D-MPL® adjuvant, as described in WO 94/00153, or a less reactogenic composition where the QS21 is quenched with cholesterol, as described in WO 96/33739. Other preferred formulations comprise an oil-in-water emulsion and tocopherol. Another particularly preferred adjuvant formulation employing QS21, 3D-MPL® adjuvant and tocopherol in an oil-in-water emulsion is described in WO 95/17210.

[0642] Another enhanced adjuvant system involves the combination of a CpG-containing oligonucleotide and a saponin derivative particularly the combination of CpG and QS21 is disclosed in WO 00/09159. Preferably the formulation additionally comprises an oil in water emulsion and tocopherol.

[0643] Additional illustrative adjuvants for use in the pharmaceutical compositions of the invention include Montamide ISA 720 (Seppic, France), SAF (Chiron, Calif., United States), ISCOMS (CSL), MF-59 (Chiron), the SBAS series of adjuvants (e.g., SBAS-2 or SBAS-4, available from SmithKline Beecham, Rixensart, Belgium), Detox (Enhanzyn®) (Corixa, Hamilton, Mont.) RC-529 (Corixa, Hamilton, Mont.) and other aminoalkyl glucosaminide 4-phosphates (AGPs), such as those described in pending U.S. patent application Ser. Nos. 08/853,826 and 09/074,720, the disclosures of which are incorporated herein by reference in their entireties, and polyoxyethylene ether adjuvants such as those described in WO 99/52549A1.

[0644] Other preferred adjuvants include adjuvant molecules of the general formula

HO(CH₂CH₂O)ₙ —A—R, (I):

[0645] wherein, n is 1-50, A is a bond or —C(O)—, R is C₁₋₅₀ alkyl or Phenyl C₁₋₅₀ alkyl.

[0646] One embodiment of the present invention consists of a vaccine formulation comprising a polyoxyethylene ether of general formula (I), wherein n is between 1 and 50, preferably 4-24, most preferably 9; the R component is C₁-C₅₀, preferably C₄-C₂₀ alkyl and most preferably C₁₂ alkyl, and A is a bond. The concentration of the polyoxyethylene ethers should be in the range 0.1-20%, preferably from 0.1-10%, and most preferably in the range 0.1-1%. Preferred polyoxyethylene ethers are selected from the following group: polyoxyethylene-9-lauryl ether, polyoxyethylene-9-steoryl ether, polyoxyethylene-8-steoryl ether, polyoxyethylene-4-lauryl ether, polyoxyethylene-35-lauryl ether, and polyoxyethylene-23-lauryl ether. Polyoxyethylene ethers such as polyoxyethylene lauryl ether are described in the Merck index (12^{th} edition: entry 7717). These adjuvant molecules are described in WO 99/52549.

[0647] The polyoxyethylene ether according to the general formula (I) above may, if desired, be combined with another adjuvant. For example, a preferred adjuvant combination is preferably with CpG as described in the pending UK patent application GB 9820956.2.

[0648] According to another embodiment of this invention, an immunogenic composition described herein is delivered to a host via antigen presenting cells (APCs), such as dendritic cells, macrophages, B cells, monocytes and other cells that may be engineered to be efficient APCs. Such cells may, but need not, be genetically modified to increase the capacity for presenting the antigen, to improve activation and/or maintenance of the T cell response, to have anti-tumor effects per se and/or to be immunologically compatible with the receiver (i.e., matched HLA haplotype). APCs may generally be isolated from any of a variety of biological fluids and organs, including tumor and peritumoral tissues, and may be autologous, allogeneic, syngeneic or xenogeneic cells.

[0649] Certain preferred embodiments of the present invention use dendritic cells or progenitors thereof as antigen-presenting cells. Dendritic cells are highly potent APCs (Banchereau and Steinman, Nature 392:245-251, 1998) and have been shown to be effective as a physiological adjuvant for eliciting prophylactic or therapeutic antitumor immunity (see Timmerman and Levy, Ann. Rev. Med. 50:507-529, 1999). In general, dendritic cells may be identified based on their typical shape (stellate in situ, with marked cytoplasmic processes (dendrites) visible in vitro), their ability to take up, process and present antigens with high efficiency and their ability to activate naïve T cell responses. Dendritic cells may, of course, be engineered to express specific cell-surface receptors or ligands that are not commonly found on dendritic cells in vivo or ex vivo, and such modified dendritic cells are contemplated by the present invention. As an alternative to dendritic cells, secreted vesicles antigen-loaded dendritic cells (called exosomes) may be used within a vaccine (see Zitvogel et al., Nature Med. 4:594-600, 1998).

[0650] Dendritic cells and progenitors may be obtained from peripheral blood, bone marrow, tumor-infiltrating cells, peritumoral tissues-infiltrating cells, lymph nodes, spleen, skin, umbilical cord blood or any other suitable tissue or fluid. For example, dendritic cells may be differentiated ex vivo by adding a combination of cytokines such as GM-CSF, IL-4, IL-13 and/or TNFα to cultures of monocytes harvested from peripheral blood. Alternatively, CD34 positive cells harvested from peripheral blood, umbilical cord blood or bone marrow may be differentiated into dendritic cells by adding to the culture medium combinations of GM-CSF, IL-3, TNFα, CD40 ligand, LPS, flt3 ligand and/or other compound(s) that induce differentiation, maturation and proliferation of dendritic cells.

[0651] Dendritic cells are conveniently categorized as “immature” and “mature” cells, which allows a simple way to discriminate between two well characterized phenotypes. However, this nomenclature should not be construed to exclude all possible intermediate stages of differentiation. Immature dendritic cells are characterized as APC with a high capacity for antigen uptake and processing, which correlates with the high expression of Fcγ receptor and mannose receptor. The mature phenotype is typically characterized by a lower expression of these markers, but a high expression of cell surface molecules responsible for T cell activation such as class I and class II MHC, adhesion molecules (e.g., CD54 and CD11) and costimulatory molecules (e.g., CD40, CD80, CD86 and 4-1BB).

[0652] APCs may generally be transfected with a polynucleotide of the invention (or portion or other variant thereof) such that the encoded polypeptide, or an immunogenic portion thereof, is expressed on the cell surface. Such transfection may take place ex vivo, and a pharmaceutical composition comprising such transfected cells may then be used for therapeutic purposes, as described herein. Alternatively, a gene delivery vehicle that targets a dendritic or other antigen presenting cell may be administered to a patient, resulting in transfection that occurs in vivo. In vivo and ex vivo transfection of dendritic cells, for example, may generally be performed using any methods known in the art, such as those described in WO 97/24447, or the gene gun approach described by Mahvi et al., Immunology and cell Biology 75:456-460, 1997. Antigen loading of dendritic cells may be achieved by incubating dendritic cells or progenitor cells with the tumor polypeptide, DNA (naked or within a plasmid vector) or RNA; or with antigen-expressing recombinant bacterium or viruses (e.g., vaccinia, fowlpox, adenovirus or lentivirus vectors). Prior to loading, the polypeptide may be covalently conjugated to an immunological partner that provides T cell help (e.g., a carrier molecule). Alternatively, a dendritic cell may be pulsed with a non-conjugated immunological partner, separately or in the presence of the polypeptide.

[0653] While any suitable carrier known to those of ordinary skill in the art may be employed in the pharmaceutical compositions of this invention, the type of carrier will typically vary depending on the mode of administration. Compositions of the present invention may be formulated for any appropriate manner of administration, including for example, topical, oral, nasal, mucosal, intravenous, intracranial, intraperitoneal, subcutaneous and intramuscular administration.

[0654] Carriers for use within such pharmaceutical compositions are biocompatible, and may also be biodegradable. In certain embodiments, the formulation preferably provides a relatively constant level of active component release. In other embodiments, however, a more rapid rate of release immediately upon administration may be desired. The formulation of such compositions is well within the level of ordinary skill in the art using known techniques. Illustrative carriers useful in this regard include microparticles of poly(lactide-co-glycolide), polyacrylate, latex, starch, cellulose, dextran and the like. Other illustrative delayed-release carriers include supramolecular biovectors, which comprise a non-liquid hydrophilic core (e.g., a cross-linked polysaccharide or oligosaccharide) and, optionally, an external layer comprising an amphiphilic compound, such as a phospholipid (see e.g., U.S. Pat. No. 5,151,254 and PCT applications WO 94/20078, WO/94/23701 and WO 96/06638). The amount of active compound contained within a sustained release formulation depends upon the site of implantation, the rate and expected duration of release and the nature of the condition to be treated or prevented.

[0655] In another illustrative embodiment, biodegradable microspheres (e.g., polylactate polyglycolate) are employed as carriers for the compositions of this invention. Suitable biodegradable microspheres are disclosed, for example, in U.S. Pat. Nos. 4,897,268; 5,075,109; 5,928,647; 5,811,128; 5,820,883; 5,853,763; 5,814,344, 5,407,609 and 5,942,252. Modified hepatitis B core protein carrier systems. such as described in WO/99 40934, and references cited therein, will also be useful for many applications. Another illustrative carrier/delivery system employs a carrier comprising particulate-protein complexes, such as those described in U.S. Pat. No. 5,928,647, which are capable of inducing a class I-restricted cytotoxic T lymphocyte responses in a host.

[0656] The pharmaceutical compositions of the invention will often further comprise one or more buffers (e.g., neutral buffered saline or phosphate buffered saline), carbohydrates (e.g., glucose, mannose, sucrose or dextrans), mannitol, proteins, polypeptides or amino acids such as glycine, antioxidants, bacteriostats, chelating agents such as EDTA or glutathione, adjuvants (e.g., aluminum hydroxide), solutes that render the formulation isotonic, hypotonic or weakly hypertonic with the blood of a recipient, suspending agents, thickening agents and/or preservatives. Alternatively, compositions of the present invention may be formulated as a lyophilizate.

[0657] The pharmaceutical compositions described herein may be presented in unit-dose or multi-dose containers, such as sealed ampoules or vials. Such containers are typically sealed in such a way to preserve the sterility and stability of the formulation until use. In general, formulations may be stored as suspensions, solutions or emulsions in oily or aqueous vehicles. Alternatively, a pharmaceutical composition may be stored in a freeze-dried condition requiring only the addition of a sterile liquid carrier immediately prior to use.

[0658] The development of suitable dosing and treatment regimens for using the particular compositions described herein in a variety of treatment regimens, including e.g., oral, parenteral, intravenous, intranasal, and intramuscular administration and formulation, is well known in the art, some of which are briefly discussed below for general purposes of illustration.

[0659] In certain applications, the pharmaceutical compositions disclosed herein may be delivered via oral administration to an animal. As such, these compositions may be formulated with an inert diluent or with an assimilable edible carrier, or they may be enclosed in hard- or soft-shell gelatin capsule, or they may be compressed into tablets, or they may be incorporated directly with the food of the diet.

[0660] The active compounds may even be incorporated with excipients and used in the form of ingestible tablets, buccal tables, troches, capsules, elixirs, suspensions, syrups, wafers, and the like (see, for example, Mathiowitz et al., Nature 1997 Mar 27;386(6623):410-4; Hwang et al., Crit Rev Ther Drug Carrier Syst 1998;15(3):243-84; U.S. Pat. No. 5,641,515; U.S. Pat. No. 5,580,579 and U.S. Pat. No. 5,792,451). Tablets, troches, pills, capsules and the like may also contain any of a variety of additional components, for example, a binder, such as gum tragacanth, acacia, cornstarch, or gelatin; excipients, such as dicalcium phosphate; a disintegrating agent, such as corn starch, potato starch, alginic acid and the like; a lubricant, such as magnesium stearate; and a sweetening agent, such as sucrose, lactose or saccharin may be added or a flavoring agent, such as peppermint, oil of wintergreen, or cherry flavoring. When the dosage unit form is a capsule, it may contain, in addition to materials of the above type, a liquid carrier. Various other materials may be present as coatings or to otherwise modify the physical form of the dosage unit. For instance, tablets, pills, or capsules may be coated with shellac, sugar, or both. Of course, any material used in preparing any dosage unit form should be pharmaceutically pure and substantially non-toxic in the amounts employed. In addition, the active compounds may be incorporated into sustained-release preparation and formulations.

[0661] Typically, these formulations will contain at least about 0.1% of the active compound or more, although the percentage of the active ingredient(s) may, of course, be varied and may conveniently be between about 1 or 2% and about 60% or 70% or more of the weight or volume of the total formulation. Naturally, the amount of active compound(s) in each therapeutically useful composition may be prepared is such a way that a suitable dosage will be obtained in any given unit dose of the compound. Factors such as solubility, bioavailability, biological half-life, route of administration, product shelf life, as well as other pharmacological considerations will be contemplated by one skilled in the art of preparing such pharmaceutical formulations, and as such, a variety of dosages and treatment regimens may be desirable.

[0662] For oral administration the compositions of the present invention may alternatively be incorporated with one or more excipients in the form of a mouthwash, dentifrice, buccal tablet, oral spray, or sublingual orally-administered formulation. Alternatively, the active ingredient may be incorporated into an oral solution such as one containing sodium borate, glycerin and potassium bicarbonate, or dispersed in a dentifrice, or added in a therapeutically-effective amount to a composition that may include water, binders, abrasives, flavoring agents, foaming agents, and humectants. Alternatively the compositions may be fashioned into a tablet or solution form that may be placed under the tongue or otherwise dissolved in the mouth.

[0663] In certain circumstances it will be desirable to deliver the pharmaceutical compositions disclosed herein parenterally, intravenously, intramuscularly, or even intraperitoneally. Such approaches are well known to the skilled artisan, some of which are further described, for example, in U.S. Pat. No. 5,543,158; U.S. Pat. No. 5,641,515 and U.S. Pat. No. 5,399,363. In certain embodiments, solutions of the active compounds as free base or pharmacologically acceptable salts may be prepared in water suitably mixed with a surfactant, such as hydroxypropylcellulose. Dispersions may also be prepared in glycerol, liquid polyethylene glycols, and mixtures thereof and in oils. Under ordinary conditions of storage and use, these preparations generally will contain a preservative to prevent the growth of microorganisms.

[0664] Illustrative pharmaceutical forms suitable for injectable use include sterile aqueous solutions or dispersions and sterile powders for the extemporaneous preparation of sterile injectable solutions or dispersions (for example, see U.S. Pat. No. 5,466,468). In all cases the form must be sterile and must be fluid to the extent that easy syringability exists. It must be stable under the conditions of manufacture and storage and must be preserved against the contaminating action of microorganisms, such as bacteria and fungi. The carrier can be a solvent or dispersion medium containing, for example, water, ethanol, polyol (e.g., glycerol, propylene glycol, and liquid polyethylene glycol, and the like), suitable mixtures thereof, and/or vegetable oils. Proper fluidity may be maintained, for example, by the use of a coating, such as lecithin, by the maintenance of the required particle size in the case of dispersion and/or by the use of surfactants. The prevention of the action of microorganisms can be facilitated by various antibacterial and antifungal agents, for example, parabens, chlorobutanol, phenol, sorbic acid, thimerosal, and the like. In many cases, it will be preferable to include isotonic agents, for example, sugars or sodium chloride. Prolonged absorption of the injectable compositions can be brought about by the use in the compositions of agents delaying absorption, for example, aluminum monostearate and gelatin.

[0665] In one embodiment, for parenteral administration in an aqueous solution, the solution should be suitably buffered if necessary and the liquid diluent first rendered isotonic with sufficient saline or glucose. These particular aqueous solutions are especially suitable for intravenous, intramuscular, subcutaneous and intraperitoneal administration. In this connection, a sterile aqueous medium that can be employed will be known to those of skill in the art in light of the present disclosure. For example, one dosage may be dissolved in 1 ml of isotonic NaCl solution and either added to 1000 ml of hypodermoclysis fluid or injected at the proposed site of infusion, (see for example, “Remington's Pharmaceutical Sciences” 15th Edition, pages 1035-1038 and 1570-1580). Some variation in dosage will necessarily occur depending on the condition of the subject being treated. Moreover, for human administration, preparations will of course preferably meet sterility, pyrogenicity, and the general safety and purity standards as required by FDA Office of Biologics standards.

[0666] In another embodiment of the invention, the compositions disclosed herein may be formulated in a neutral or salt form. Illustrative pharmaceutically-acceptable salts include the acid addition salts (formed with the free amino groups of the protein) and which are formed with inorganic acids such as, for example, hydrochloric or phosphoric acids, or such organic acids as acetic, oxalic, tartaric, mandelic, and the like. Salts formed with the free carboxyl groups can also be derived from inorganic bases such as, for example, sodium, potassium, ammonium, calcium, or ferric hydroxides, and such organic bases as isopropylamine, trimethylamine, histidine, procaine and the like. Upon formulation, solutions will be administered in a manner compatible with the dosage formulation and in such amount as is therapeutically effective.

[0667] The carriers can further comprise any and all solvents, dispersion media, vehicles, coatings, diluents, antibacterial and antifungal agents, isotonic and absorption delaying agents, buffers, carrier solutions, suspensions, colloids, and the like. The use of such media and agents for pharmaceutical active substances is well known in the art. Except insofar as any conventional media or agent is incompatible with the active ingredient, its use in the therapeutic compositions is contemplated. Supplementary active ingredients can also be incorporated into the compositions. The phrase “pharmaceutically-acceptable” refers to molecular entities and compositions that do not produce an allergic or similar untoward reaction when administered to a human.

[0668] In certain embodiments, the pharmaceutical compositions may be delivered by intranasal sprays, inhalation, and/or other aerosol delivery vehicles. Methods for delivering genes, nucleic acids, and peptide compositions directly to the lungs via nasal aerosol sprays has been described, e.g., in U.S. Pat. No. 5,756,353 and U.S. Pat. No. 5,804,212. Likewise, the delivery of drugs using intranasal microparticle resins (Takenaga et al., J Controlled Release 1998 Mar 2;52(1-2):81-7) and lysophosphatidyl-glycerol compounds (U.S. Pat. No. 5,725,871) are also well-known in the pharmaceutical arts. Likewise, illustrative transmucosal drug delivery in the form of a polytetrafluoroetheylene support matrix is described in U.S. Pat. No. 5,780,045.

[0669] In certain embodiments, liposomes, nanocapsules, microparticles, lipid particles, vesicles, and the like, are used for the introduction of the compositions of the present invention into suitable host cells/organisms. In particular, the compositions of the present invention may be formulated for delivery either encapsulated in a lipid particle, a liposome, a vesicle, a nanosphere, or a nanoparticle or the like. Alternatively, compositions of the present invention can be bound, either covalently or non-covalently, to the surface of such carrier vehicles.

[0670] The formation and use of liposome and liposome-like preparations as potential drug carriers is generally known to those of skill in the art (see for example, Lasic, Trends Biotechnol 1998 Jul;16(7):307-21; Takakura, Nippon Rinsho 1998 Mar;56(3):691-5; Chandran et al., Indian J Exp Biol. 1997 Aug;35(8):801-9; Margalit, Crit Rev Ther Drug Carrier Syst. 1995;12(2-3):233-61; U.S. Pat. No. 5,567,434; U.S. Pat. No. 5,552,157; U.S. Pat. No. 5,565,213; U.S. Pat. No. 5,738,868 and U.S. Pat. No. 5,795,587, each specifically incorporated herein by reference in its entirety).

[0671] Liposomes have been used successfully with a number of cell types that are normally difficult to transfect by other procedures, including T cell suspensions, primary hepatocyte cultures and PC 12 cells (Renneisen et al., J. Biol. Chem. 1990 Sep 25;265(27):16337-42; Muller et al., DNA Cell Biol. 1990 Apr;9(3):221-9). In addition, liposomes are free of the DNA length constraints that are typical of viral-based delivery systems. Liposomes have been used effectively to introduce genes, various drugs, radiotherapeutic agents, enzymes, viruses, transcription factors, allosteric effectors and the like, into a variety of cultured cell lines and animals. Furthermore, he use of liposomes does not appear to be associated with autoimmune responses or unacceptable toxicity after systemic delivery.

[0672] In certain embodiments, liposomes are formed from phospholipids that are dispersed in an aqueous medium and spontaneously form multilamellar concentric bilayer vesicles (also termed multilamellar vesicles (MLVs).

[0673] Alternatively, in other embodiments, the invention provides for pharmaceutically-acceptable nanocapsule formulations of the compositions of the present invention. Nanocapsules can generally entrap compounds in a stable and reproducible way (see, for example, Quintanar-Guerrero et al., Drug Dev Ind Pharm. 1998 Dec;24(12):1113-28). To avoid side effects due to intracellular polymeric overloading, such ultrafine particles (sized around 0.1 μm) may be designed using polymers able to be degraded in vivo. Such particles can be made as described, for example, by Couvreur et al., Crit Rev Ther Drug Carrier Syst. 1988;5(1):1-20; zur Muhlen et al., Eur J Pharm Biopharm. 1998 Mar;45(2):149-55; Zambaux et al. J Controlled Release. 1998 Jan 2;50(1-3):31-40; and U.S. Pat. No. 5,145,684.

[0674] Cancer Therapeutic Methods

[0675] Immunologic approaches to cancer therapy are based on the recognition that cancer cells can often evade the body's defenses against aberrant or foreign cells and molecules, and that these defenses might be therapeutically stimulated to regain the lost ground, e.g. pgs. 623-648 in Klein, Immunology (Wiley-Interscience, New York, 1982). Numerous recent observations that various immune effectors can directly or indirectly inhibit growth of tumors has led to renewed interest in this approach to cancer therapy, e.g. Jager, et al., Oncology 2001;60(1):1-7; Renner, et al., Ann Hematol 2000 Dec;79(12):651-9.

[0676] Four-basic cell types whose function has been associated with antitumor cell immunity and the elimination of tumor cells from the body are: i) B-lymphocytes which secrete immunoglobulins into the blood plasma for identifying and labeling the nonself invader cells; ii) monocytes which secrete the complement proteins that are responsible for lysing and processing the immunoglobulin-coated target invader cells; iii) natural killer lymphocytes having two mechanisms for the destruction of tumor cells, antibody-dependent cellular cytotoxicity and natural killing, and iv) T-lymphocytes possessing antigen-specific receptors and having the capacity to recognize a tumor cell carrying complementary marker molecules (Schreiber, H., 1989, in Fundamental Immunology (ed). W. E. Paul, pp. 923-955).

[0677] Cancer immunotherapy generally focuses on inducing humoral immune responses, cellular immune responses, or both. Moreover, it is well established that induction of CD4⁺ T helper cells is necessary in order to secondarily induce either antibodies or cytotoxic CD8⁺ T cells. Polypeptide antigens that are selective or ideally specific for cancer cells, particularly lung cancer cells, offer a powerful approach for inducing immune responses against lung cancer, and are an important aspect of the present invention.

[0678] Therefore, in further aspects of the present invention, the pharmaceutical compositions described herein may be used for the treatment of cancer, particularly for the immunotherapy of lung cancer. Within such methods, the pharmaceutical compositions described herein are administered to a patient, typically a warm-blooded animal, preferably a human. A patient may or may not be afflicted with cancer. Accordingly, the above pharmaceutical compositions may be used to prevent the development of a cancer or to treat a patient afflicted with a cancer. Pharmaceutical compositions and vaccines may be administered either prior to or following surgical removal of primary tumors and/or treatment such as administration of radiotherapy or conventional chemotherapeutic drugs. As discussed above, administration of the pharmaceutical compositions may be by any suitable method, including administration by intravenous, intraperitoneal, intramuscular, subcutaneous, intranasal, intradermal, anal, vaginal, topical and oral routes.

[0679] Within certain embodiments, immunotherapy may be active immunotherapy, in which treatment relies on the in vivo stimulation of the endogenous host immune system to react against tumors with the administration of immune response-modifying agents (such as polypeptides and polynucleotides as provided herein).

[0680] Within other embodiments, immunotherapy may be passive immunotherapy, in which treatment involves the delivery of agents with established tumor-immune reactivity (such as effector cells or antibodies) that can directly or indirectly mediate antitumor effects and does not necessarily depend on an intact host immune system. Examples of effector cells include T cells as discussed above, T lymphocytes (such as CD8⁺ cytotoxic T lymphocytes and CD4⁺ T-helper tumor-infiltrating lymphocytes), killer cells (such as Natural Killer cells and lymphokine-activated killer cells), B cells and antigen-presenting cells (such as dendritic cells and macrophages) expressing a polypeptide provided herein. T cell receptors and antibody receptors specific for the polypeptides recited herein may be cloned, expressed and transferred into other vectors or effector cells for adoptive immunotherapy. The polypeptides provided herein may also be used to generate antibodies or anti-idiotypic antibodies (as described above and in U.S. Pat. No. 4,918,164) for passive immunotherapy.

[0681] Monoclonal antibodies may be labeled with any of a variety of labels for desired selective usages in detection, diagnostic assays or therapeutic applications (as described in U.S. Pat. Nos. 6,090,365; 6,015,542; 5,843,398; 5,595,721; and 4,708,930, hereby incorporated by reference in their entirety as if each was incorporated individually). In each case, the binding of the labelled monoclonal antibody to the determinant site of the antigen will signal detection or delivery of a particular therapeutic agent to the antigenic determinant on the non-normal cell. A further object of this invention is to provide the specific monoclonal antibody suitably labelled for achieving such desired selective usages thereof.

[0682] Effector cells may generally be obtained in sufficient quantities for adoptive immunotherapy by growth in vitro, as described herein. Culture conditions for expanding single antigen-specific effector cells to several billion in number with retention of antigen recognition in vivo are well known in the art. Such in vitro culture conditions typically use intermittent stimulation with antigen, often in the presence of cytokines (such as IL-2) and non-dividing feeder cells. As noted above, immunoreactive polypeptides as provided herein may be used to rapidly expand antigen-specific T cell cultures in order to generate a sufficient number of cells for immunotherapy. In particular, antigen-presenting cells, such as dendritic, macrophage, monocyte, fibroblast and/or B cells, may be pulsed with immunoreactive polypeptides or transfected with one or more polynucleotides using standard techniques well known in the art. For example, antigen-presenting cells can be transfected with a polynucleotide having a promoter appropriate for increasing expression in a recombinant virus or other expression system. Cultured effector cells for use in therapy must be able to grow and distribute widely, and to survive long term in vivo. Studies have shown that cultured effector cells can be induced to grow in vivo and to survive long term in substantial numbers by repeated stimulation with antigen supplemented with IL-2 (see, for example, Cheever et al., Immunological Reviews 157:177, 1997).

[0683] Alternatively, a vector expressing a polypeptide recited herein may be introduced into antigen presenting cells taken from a patient and clonally propagated ex vivo for transplant back into the same patient. Transfected cells may be reintroduced into the patient using any means known in the art, preferably in sterile form by intravenous, intracavitary, intraperitoneal or intratumor administration.

[0684] Routes and frequency of administration of the therapeutic compositions described herein, as well as dosage, will vary from individual to individual, and may be readily established using standard techniques. In general, the pharmaceutical compositions and vaccines may be administered by injection (e.g., intracutaneous, intramuscular, intravenous or subcutaneous), intranasally (e.g., by aspiration) or orally. Preferably, between 1 and 10 doses may be administered over a 52 week period. Preferably, 6 doses are administered, at intervals of 1 month, and booster vaccinations may be given periodically thereafter. Alternate protocols may be appropriate for individual patients. A suitable dose is an amount of a compound that, when administered as described above, is capable of promoting an anti-tumor immune response, and is at least 10-50% above the basal (i.e., untreated) level. Such response can be monitored by measuring the anti-tumor antibodies in a patient or by vaccine-dependent generation of cytolytic effector cells capable of killing the patient's tumor cells in vitro. Such vaccines should also be capable of causing an immune response that leads to an improved clinical outcome (e.g., more frequent remissions, complete or partial or longer disease-free survival) in vaccinated patients as compared to non-vaccinated patients. In general, for pharmaceutical compositions and vaccines comprising one or more polypeptides, the amount of each polypeptide present in a dose ranges from about 25 μg to 5 mg per kg of host. Suitable dose sizes will vary with the size of the patient, but will typically range from about 0.1 mL to about 5 mL.

[0685] In general, an appropriate dosage and treatment regimen provides the active compound(s) in an amount sufficient to provide therapeutic and/or prophylactic benefit. Such a response can be monitored by establishing an improved clinical outcome (e.g., more frequent remissions, complete or partial, or longer disease-free survival) in treated patients as compared to non-treated patients. Increases in preexisting immune responses to a tumor protein generally correlate with an improved clinical outcome. Such immune responses may generally be evaluated using standard proliferation, cytotoxicity or cytokine assays, which may be performed using samples obtained from a patient before and after treatment.

[0686] Cancer Detection and Diagnostic Compositions Methods and Kits

[0687] In general, a cancer may be detected in a patient based on the presence of one or more lung tumor proteins and/or polynucleotides encoding such proteins in a biological sample (for example, blood, sera, sputum urine and/or tumor biopsies) obtained from the patient. In other words, such proteins may be used as markers to indicate the presence or absence of a cancer such as lung cancer. In addition, such proteins may be useful for the detection of other cancers. The binding agents provided herein generally permit detection of the level of antigen that binds to the agent in the biological sample.

[0688] Polynucleotide primers and probes may be used to detect the level of mRNA encoding a tumor protein, which is also indicative of the presence or absence of a cancer. In general, a tumor sequence should be present at a level that is at least two-fold, preferably three-fold, and more preferably five-fold or higher in tumor tissue than in normal tissue of the same type from which the tumor arose. Expression levels of a particular tumor sequence in tissue types different from that in which the tumor arose are irrelevant in certain diagnostic embodiments since the presence of tumor cells can be confirmed by observation of predetermined differential expression levels, e.g., 2-fold, 5-fold, etc, in tumor tissue to expression levels in normal tissue of the same type.

[0689] Other differential expression patterns can be utilized advantageously for diagnostic purposes. For example, in one aspect of the invention, overexpression of a tumor sequence in tumor tissue and normal tissue of the same type, but not in other normal tissue types, e.g. PBMCs, can be exploited diagnostically. In this case, the presence of metastatic tumor cells, for example in a sample taken from the circulation or some other tissue site different from that in which the tumor arose, can be identified and/or confirmed by detecting expression of the tumor sequence in the sample, for example using RT-PCR analysis. In many instances, it will be desired to enrich for tumor cells in the sample of interest, e.g., PBMCs, using cell capture or other like techniques.

[0690] There are a variety of assay formats known to those of ordinary skill in the art for using a binding agent to detect polypeptide markers in a sample. See, e.g., Harlow and Lane, Antibodies: A Laboratory Manual, Cold Spring Harbor Laboratory, 1988. In general, the presence or absence of a cancer in a patient may be determined by (a) contacting a biological sample obtained from a patient with a binding agent; (b) detecting in the sample a level of polypeptide that binds to the binding agent; and (c) comparing the level of polypeptide with a predetermined cut-off value.

[0691] In a preferred embodiment, the assay involves the use of binding agent immobilized on a solid support to bind to and remove the polypeptide from the remainder of the sample. The bound polypeptide may then be detected using a detection reagent that contains a reporter group and specifically binds to the binding agent/polypeptide complex. Such detection reagents may comprise, for example, a binding agent that specifically binds to the polypeptide or an antibody or other agent that specifically binds to the binding agent, such as an anti-immunoglobulin, protein G, protein A or a lectin. Alternatively, a competitive assay may be utilized, in which a polypeptide is labeled with a reporter group and allowed to bind to the immobilized binding agent after incubation of the binding agent with the sample. The extent to which components of the sample inhibit the binding of the labeled polypeptide to the binding agent is indicative of the reactivity of the sample with the immobilized binding agent. Suitable polypeptides for use within such assays include full length lung tumor proteins and polypeptide portions thereof to which the binding agent binds, as described above.

[0692] The solid support may be any material known to those of ordinary skill in the art to which the tumor protein may be attached. For example, the solid support may be a test well in a microtiter plate or a nitrocellulose or other suitable membrane. Alternatively, the support may be a bead or disc, such as glass, fiberglass, latex or a plastic material such as polystyrene or polyvinylchloride. The support may also be a magnetic particle or a fiber optic sensor, such as those disclosed, for example, in U.S. Pat. No. 5,359,681. The binding agent may be immobilized on the solid support using a variety of techniques known to those of skill in the art, which are amply described in the patent and scientific literature. In the context of the present invention, the term “immobilization” refers to both noncovalent association, such as adsorption, and covalent attachment (which may be a direct linkage between the agent and functional groups on the support or may be a linkage by way of a cross-linking agent). Immobilization by adsorption to a well in a microtiter plate or to a membrane is preferred. In such cases, adsorption may be achieved by contacting the binding agent, in a suitable buffer, with the solid support for a suitable amount of time. The contact time varies with temperature, but is typically between about 1 hour and about 1 day. In general, contacting a well of a plastic microtiter plate (such as polystyrene or polyvinylchloride) with an amount of binding agent ranging from about 10 ng to about 10 μg, and preferably about 100 ng to about 1 μg, is sufficient to immobilize an adequate amount of binding agent.

[0693] Covalent attachment of binding agent to a solid support may generally be achieved by first reacting the support with a bifunctional reagent that will react with both the support and a functional group, such as a hydroxyl or amino group, on the binding agent. For example, the binding agent may be covalently attached to supports having an appropriate polymer coating using benzoquinone or by condensation of an aldehyde group on the support with an amine and an active hydrogen on the binding partner (see, e.g., Pierce Immunotechnology Catalog and Handbook, 1991, at A12-A13).

[0694] In certain embodiments, the assay is a two-antibody sandwich assay. This assay may be performed by first contacting an antibody that has been immobilized on a solid support, commonly the well of a microtiter plate, with the sample, such that polypeptides within the sample are allowed to bind to the immobilized antibody. Unbound sample is then removed from the immobilized polypeptide-antibody complexes and a detection reagent (preferably a second antibody capable of binding to a different site on the polypeptide) containing a reporter group is added. The amount of detection reagent that remains bound to the solid support is then determined using a method appropriate for the specific reporter group.

[0695] More specifically, once the antibody is immobilized on the support as described above, the remaining protein binding sites on the support are typically blocked. Any suitable blocking agent known to those of ordinary skill in the art, such as bovine serum albumin or Tween 20® (Sigma Chemical Co., St. Louis, Mo.). The immobilized antibody is then incubated with the sample, and polypeptide is allowed to bind to the antibody. The sample may be diluted with a suitable diluent, such as phosphate-buffered saline (PBS) prior to incubation. In general, an appropriate contact time (i.e., incubation time) is a period of time that is sufficient to detect the presence of polypeptide within a sample obtained from an individual with lung cancer. Preferably, the contact time is sufficient to achieve a level of binding that is at least about 95% of that achieved at equilibrium between bound and unbound polypeptide. Those of ordinary skill in the art will recognize that the time necessary to achieve equilibrium may be readily determined by assaying the level of binding that occurs over a period of time. At room temperature, an incubation time of about 30 minutes is generally sufficient.

[0696] Unbound sample may then be removed by washing the solid support with an appropriate buffer, such as PBS containing 0.1% Tween 20®. The second antibody, which contains a reporter group, may then be added to the solid support. Preferred reporter groups include those groups recited above.

[0697] The detection reagent is then incubated with the immobilized antibody-polypeptide complex for an amount of time sufficient to detect the bound polypeptide. An appropriate amount of time may generally be determined by assaying the level of binding that occurs over a period of time. Unbound detection reagent is then removed and bound detection reagent is detected using the reporter group. The method employed for detecting the reporter group depends upon the nature of the reporter group. For radioactive groups, scintillation counting or autoradiographic methods are generally appropriate. Spectroscopic methods may be used to detect dyes, luminescent groups and fluorescent groups. Biotin may be detected using avidin, coupled to a different reporter group (commonly a radioactive or fluorescent group or an enzyme). Enzyme reporter groups may generally be detected by the addition of substrate (generally for a specific period of time), followed by spectroscopic or other analysis of the reaction products.

[0698] To determine the presence or absence of a cancer, such as lung cancer, the signal detected from the reporter group that remains bound to the solid support is generally compared to a signal that corresponds to a predetermined cut-off value. In one preferred embodiment, the cut-off value for the detection of a cancer is the average mean signal obtained when the immobilized antibody is incubated with samples from patients without the cancer. In general, a sample generating a signal that is three standard deviations above the predetermined cut-off value is considered positive for the cancer. In an alternate preferred embodiment, the cut-off value is determined using a Receiver Operator Curve, according to the method of Sackett et al., Clinical Epidemiology: A Basic Science for Clinical Medicine, Little Brown and Co., 1985, p. 106-7. Briefly, in this embodiment, the cut-off value may be determined from a plot of pairs of true positive rates (i.e., sensitivity) and false positive rates (100%-specificity) that correspond to each possible cut-off value for the diagnostic test result. The cut-off value on the plot that is the closest to the upper left-hand corner (i.e., the value that encloses the largest area) is the most accurate cut-off value, and a sample generating a signal that is higher than the cut-off value determined by this method may be considered positive. Alternatively, the cut-off value may be shifted to the left along the plot, to minimize the false positive rate, or to the right, to minimize the false negative rate. In general, a sample generating a signal that is higher than the cut-off value determined by this method is considered positive for a cancer.

[0699] In a related embodiment, the assay is performed in a flow-through or strip test format, wherein the binding agent is immobilized on a membrane, such as nitrocellulose. In the flow-through test, polypeptides within the sample bind to the immobilized binding agent as the sample passes through the membrane. A second, labeled binding agent then binds to the binding agent-polypeptide complex as a solution containing the second binding agent flows through the membrane. The detection of bound second binding agent may then be performed as described above. In the strip test format, one end of the membrane to which binding agent is bound is immersed in a solution containing the sample. The sample migrates along the membrane through a region containing second binding agent and to the area of immobilized binding agent. Concentration of second binding agent at the area of immobilized antibody indicates the presence of a cancer. Typically, the concentration of second binding agent at that site generates a pattern, such as a line, that can be read visually. The absence of such a pattern indicates a negative result. In general, the amount of binding agent immobilized on the membrane is selected to generate a visually discernible pattern when the biological sample contains a level of polypeptide that would be sufficient to generate a positive signal in the two-antibody sandwich assay, in the format discussed above. Preferred binding agents for use in such assays are antibodies and antigen-binding fragments thereof. Preferably, the amount of antibody immobilized on the membrane ranges from about 25 ng to about 1 μg, and more preferably from about 50 ng to about 500 ng. Such tests can typically be performed with a very small amount of biological sample.

[0700] Of course, numerous other assay protocols exist that are suitable for use with the tumor proteins or binding agents of the present invention. The above descriptions are intended to be exemplary only. For example, it will be apparent to those of ordinary skill in the art that the above protocols may be readily modified to use tumor polypeptides to detect antibodies that bind to such polypeptides in a biological sample. The detection of such tumor protein specific antibodies may correlate with the presence of a cancer.

[0701] A cancer may also, or alternatively, be detected based on the presence of T cells that specifically react with a tumor protein in a biological sample. Within certain methods, a biological sample comprising CD4⁺ and/or CD8⁺ T cells isolated from a patient is incubated with a tumor polypeptide, a polynucleotide encoding such a polypeptide and/or an APC that expresses at least an immunogenic portion of such a polypeptide, and the presence or absence of specific activation of the T cells is detected. Suitable biological samples include, but are not limited to, isolated T cells. For example, T cells may be isolated from a patient by routine techniques (such as by Ficoll/Hypaque density gradient centrifugation of peripheral blood lymphocytes). T cells may be incubated in vitro for 2-9 days (typically 4 days) at 37° C. with polypeptide (e.g., 5-25 μg/ml). It may be desirable to incubate another aliquot of a T cell sample in the absence of tumor polypeptide to serve as a control. For CD4⁺ T cells, activation is preferably detected by evaluating proliferation of the T cells. For CD8⁺ T cells, activation is preferably detected by evaluating cytolytic activity. A level of proliferation that is at least two fold greater and/or a level of cytolytic activity that is at least 20% greater than in disease-free patients indicates the presence of a cancer in the patient.

[0702] As noted above, a cancer may also, or alternatively, be detected based on the level of mRNA encoding a tumor protein in a biological sample. For example, at least two oligonucleotide primers may be employed in a polymerase chain reaction (PCR) based assay to amplify a portion of a tumor cDNA derived from a biological sample, wherein at least one of the oligonucleotide primers is specific for (i.e., hybridizes to) a polynucleotide encoding the tumor protein. The amplified cDNA is then separated and detected using techniques well known in the art, such as gel electrophoresis.

[0703] Similarly, oligonucleotide probes that specifically hybridize to a polynucleotide encoding a tumor protein may be used in a hybridization assay to detect the presence of polynucleotide encoding the tumor protein in a biological sample.

[0704] To permit hybridization under assay conditions, oligonucleotide primers and probes should comprise an oligonucleotide sequence that has at least about 60%, preferably at least about 75% and more preferably at least about 90%, identity to a portion of a polynucleotide encoding a tumor protein of the invention that is at least 10 nucleotides, and preferably at least 20 nucleotides, in length. Preferably, oligonucleotide primers and/or probes hybridize to a polynucleotide encoding a polypeptide described herein under moderately stringent conditions, as defined above. Oligonucleotide primers and/or probes which may be usefully employed in the diagnostic methods described herein preferably are at least 10-40 nucleotides in length. In a preferred embodiment, the oligonucleotide primers comprise at least 10 contiguous nucleotides, more preferably at least 15 contiguous nucleotides, of a DNA molecule having a sequence as disclosed herein. Techniques for both PCR based assays and hybridization assays are well known in the art (see, for example, Mullis et al., Cold Spring Harbor Symp. Quant. Biol., 51:263, 1987; Erlich ed., PCR Technology, Stockton Press, NY, 1989).

[0705] One preferred assay employs RT-PCR, in which PCR is applied in conjunction with reverse transcription. Typically, RNA is extracted from a biological sample, such as biopsy tissue, and is reverse transcribed to produce cDNA molecules. PCR amplification using at least one specific primer generates a cDNA molecule, which may be separated and visualized using, for example, gel electrophoresis. Amplification may be performed on biological samples taken from a test patient and from an individual who is not afflicted with a cancer. The amplification reaction may be performed on several dilutions of cDNA spanning two orders of magnitude. A two-fold or greater increase in expression in several dilutions of the test patient sample as compared to the same dilutions of the non-cancerous sample is typically considered positive.

[0706] In another aspect of the present invention, cell capture technologies may be used in conjunction, with, for example, real-time PCR to provide a more sensitive tool for detection of metastatic cells expressing lung tumor antigens. Detection of lung cancer cells in biological samples, e.g., bone marrow samples, peripheral blood, and small needle aspiration samples is desirable for diagnosis and prognosis in lung cancer patients.

[0707] Immunomagnetic beads coated with specific monoclonal antibodies to surface cell markers, or tetrameric antibody complexes, may be used to first enrich or positively select cancer cells in a sample. Various commercially available kits may be used, including Dynabeads® Epithelial Enrich (Dynal Biotech, Oslo, Norway), StemSep™ (StemCell Technologies, Inc., Vancouver, BC), and RosetteSep (StemCell Technologies). A skilled artisan will recognize that other methodologies and kits may also be used to enrich or positively select desired cell populations. Dynabeads® Epithelial Enrich contains magnetic beads coated with mAbs specific for two glycoprotein membrane antigens expressed on normal and neoplastic epithelial tissues. The coated beads may be added to a sample and the sample then applied to a magnet, thereby capturing the cells bound to the beads. The unwanted cells are washed away and the magnetically isolated cells eluted from the beads and used in further analyses.

[0708] RosetteSep can be used to enrich cells directly from a blood sample and consists of a cocktail of tetrameric antibodies that targets a variety of unwanted cells and crosslinks them to glycophorin A on red blood cells (RBC) present in the sample, forming rosettes. When centrifuged over Ficoll, targeted cells pellet along with the free RBC. The combination of antibodies in the depletion cocktail determines which cells will be removed and consequently which cells will be recovered. Antibodies that are available include, but are not limited to: CD2, CD3, CD4, CD5, CD8, CD10, CD11b, CD14, CD15, CD16, CD19, CD20, CD24, CD25, CD29, CD33, CD34, CD36, CD38, CD41, CD45, CD45RA, CD45RO, CD56, CD66B, CD66e, HLA-DR, IgE, and TCRαβ.

[0709] Additionally, it is contemplated in the present invention that mAbs specific for lung tumor antigens can be generated and used in a similar manner. For example, mAbs that bind to tumor-specific cell surface antigens may be conjugated to magnetic beads, or formulated in a tetrameric antibody complex, and used to enrich or positively select metastatic lung tumor cells from a sample. Once a sample is enriched or positively selected, cells may be lysed and RNA isolated. RNA may then be subjected to RT-PCR analysis using lung tumor-specific primers in a real-time PCR assay as described herein. One skilled in the art will recognize that enriched or selected populations of cells may be analyzed by other methods (e.g. in situ hybridization or flow cytometry).

[0710] In another embodiment, the compositions described herein may be used as markers for the progression of cancer. In this embodiment, assays as described above for the diagnosis of a cancer may be performed over time, and the change in the level of reactive polypeptide(s) or polynucleotide(s) evaluated. For example, the assays may be performed every 24-72 hours for a period of 6 months to 1 year, and thereafter performed as needed. In general, a cancer is progressing in those patients in whom the level of polypeptide or polynucleotide detected increases over time. In contrast, the cancer is not progressing when the level of reactive polypeptide or polynucleotide either remains constant or decreases with time.

[0711] Certain in vivo diagnostic assays may be performed directly on a tumor. One such assay involves contacting tumor cells with a binding agent. The bound binding agent may then be detected directly or indirectly via a reporter group. Such binding agents may also be used in histological applications. Alternatively, polynucleotide probes may be used within such applications.

[0712] As noted above, to improve sensitivity, multiple tumor protein markers may be assayed within a given sample. It will be apparent that binding agents specific for different proteins provided herein may be combined within a single assay. Further, multiple primers or probes may be used concurrently. The selection of tumor protein markers may be based on routine experiments to determine combinations that results in optimal sensitivity. In addition, or alternatively, assays for tumor proteins provided herein may be combined with assays for other known tumor antigens.

[0713] The present invention further provides kits for use within any of the above diagnostic methods. Such kits typically comprise two or more components necessary for performing a diagnostic assay. Components may be compounds, reagents, containers and/or equipment. For example, one container within a kit may contain a monoclonal antibody or fragment thereof that specifically binds to a tumor protein. Such antibodies or fragments may be provided attached to a support material, as described above. One or more additional containers may enclose elements, such as reagents or buffers, to be used in the assay. Such kits may also, or alternatively, contain a detection reagent as described above that contains a reporter group suitable for direct or indirect detection of antibody binding.

[0714] Alternatively, a kit may be designed to detect the level of mRNA encoding a tumor protein in a biological sample. Such kits generally comprise at least one oligonucleotide probe or primer, as described above, that hybridizes to a polynucleotide encoding a tumor protein. Such an oligonucleotide may be used, for example, within a PCR or hybridization assay. Additional components that may be present within such kits include a second oligonucleotide and/or a diagnostic reagent or container to facilitate the detection of a polynucleotide encoding a tumor protein.

[0715] The following examples are offered by way of illustration and not by way of limitation.

### EXAMPLES

### Example 1

### Isolation and Characterization of cDNA Sequences Encoding Lung Tumor Polypeptides

[0716] This example illustrates the isolation of cDNA molecules encoding lung tumor-specific polypeptides from lung tumor cDNA libraries.

[0717] A. Isolation of cDNA Sequences From a Lung Squamous Cell Carcinoma Library

[0718] A human lung squamous cell carcinoma cDNA expression library was constructed from poly A⁺ RNA from a pool of two patient tissues using a Superscript Plasmid System for cDNA Synthesis and Plasmid Cloning kit (BRL Life Technologies, Gaithersburg, Md.) following the manufacturer's protocol. Specifically, lung carcinoma tissues were homogenized with polytron (Kinematica, Switzerland) and total RNA was extracted using Trizol reagent (BRL Life Technologies) as directed by the manufacturer. The poly A⁺ RNA was then purified using an oligo dT cellulose column as described in Sambrook et al., Molecular Cloning: A Laboratory Manual, Cold Spring Harbor Laboratories, Cold Spring Harbor, N.Y., 1989. First-strand cDNA was synthesized using the NotI/Oligo-dT18 primer. Double-stranded cDNA was synthesized, ligated with BstXI/EcoRI adaptors (Invitrogen, San Diego, Calif.) and digested with NotI. Following size fractionation with cDNA size fractionation columns (BRL Life Technologies), the cDNA was ligated into the BstXI/NotI site of pcDNA3.1 (Invitrogen) and transformed into ElectroMax E. coli DH10B cells (BRL Life Technologies) by electroporation.

[0719] Using the same procedure, a normal human lung cDNA expression library was prepared from a pool of four tissue specimens. The cDNA libraries were characterized by determining the number of independent colonies, the percentage of clones that carried insert, the average insert size and by sequence analysis. The lung squamous cell carcinoma library contained 2.7×10⁶ independent colonies, with 100% of clones having an insert and the average insert size being 2100 base pairs. The normal lung cDNA library contained 1.4×10⁶ independent colonies, with 90% of clones having inserts and the average insert size being 1800 base pairs. For both libraries, sequence analysis showed that the majority of clones had a full length cDNA sequence and were synthesized from mRNA cDNA library subtraction was performed using the above lung squamous cell carcinoma and normal lung cDNA libraries, as described by Hara et al. (Blood, 84:189-199, 1994) with some modifications. Specifically, a lung squamous cell carcinoma-specific subtracted cDNA library was generated as follows. Normal tissue cDNA library (80 μg) was digested with BamHI and XhoI, followed by a filling-in reaction with DNA polymerase Klenow fragment. After phenol-chloroform extraction and ethanol precipitation, the DNA was dissolved in 133 μl of H₂O, heat-denatured and mixed with 133 μl (133 μg) of Photoprobe biotin (Vector Laboratories, Burlingame, Calif.). As recommended by the manufacturer, the resulting mixture was irradiated with a 270 W sunlamp on ice for 20 minutes. Additional Photoprobe biotin (67 μl) was added and the biotinylation reaction was repeated. After extraction with butanol five times, the DNA was ethanol-precipitated and dissolved in 23 μl H₂O to form the driver DNA.

[0720] To form the tracer DNA, 10 μg lung squamous cell carcinoma cDNA library was digested with NotI and SpeI, phenol chloroform extracted and passed through Chroma spin-400 columns (Clontech, Palo Alto, Calif.). Typically, 5 μg of cDNA was recovered after the sizing column. Following ethanol precipitation, the tracer DNA was dissolved in 5 μl H₂O. Tracer DNA was mixed with 15 μl driver DNA and 20 μl of 2× hybridization buffer (1.5 M NaCl/I 0 mM EDTA/50 mM HEPES pH 7.5/0.2% sodium dodecyl sulfate), overlaid with mineral oil, and heat-denatured completely. The sample was immediately transferred into a 68° C. water bath and incubated for 20 hours (long hybridization [LH]). The reaction mixture was then subjected to a streptavidin treatment followed by phenol/chloroform extraction. This process was repeated three more times. Subtracted DNA was precipitated, dissolved in 12 μl H₂O, mixed with 8 μl driver DNA and 20 μl of 2× hybridization buffer, and subjected to a hybridization at 68° C. for 2 hours (short hybridization [SH]). After removal of biotinylated double-stranded DNA, subtracted cDNA was ligated into NotI/SpeI site of chloramphenicol resistant pBCSK⁺ (Stratagene, La Jolla, Calif.) and transformed into ElectroMax E. coli DH10B cells by electroporation to generate a lung squamous cell carcinoma specific subtracted cDNA library (herein after referred to as “lung subtraction I”).

[0721] A second lung squamous cell carcinoma specific subtracted cDNA library (referred to as “lung subtraction II”) was generated in a similar way to the lung subtraction library I, except that eight frequently recovered genes from lung subtraction I were included in the driver DNA, and 24,000 independent clones were recovered.

[0722] To analyze the subtracted cDNA libraries, plasmid DNA was prepared from 320 independent clones, randomly picked from the subtracted lung squamous cell carcinoma specific libraries. Representative cDNA clones were further characterized by DNA sequencing with a Perkin Elmer/Applied Biosystems Division Automated Sequencer Model 373A and/or Model 377 (Foster City, Calif.). The cDNA sequences for sixty isolated clones are provided in SEQ ID NO: 1-60. These sequences were compared to known sequences in the gene bank using the EMBL and GenBank databases (release 96). No significant homologies were found to the sequences provided in SEQ ID NO: 2, 3, 19, 38 and 46. The sequences of SEQ ID NO: 1, 6-8, 10-13, 15, 17, 18, 20-27, 29, 30, 32, 34-37, 39-45, 47-49, 51, 52, 54, 55 and 57-59 were found to show some homology to previously identified expressed sequence tags (ESTs). The sequences of SEQ ID NO: 9, 28, 31 and 33 were found to show some homology to previously identified non-human gene sequences and the sequences of SEQ ID NO: 4, 5, 14, 50, 53, 56 and 60 were found to show some homology to gene sequences previously identified in humans.

[0723] The subtraction procedure described above was repeated using the above lung squamous cell carcinoma cDNA library as the tracer DNA, and the above normal lung tissue cDNA library and a cDNA library from normal liver and heart (constructed from a pool of one sample of each tissue as described above), plus twenty other cDNA clones that were frequently recovered in lung subtractions I and II, as the driver DNA (lung subtraction III). The normal liver and heart cDNA library contained 1.76×10⁶ independent colonies, with 100% of clones having inserts and the average insert size being 1600 base pairs. Ten additional clones were isolated (SEQ ID NO: 61-70). Comparison of these cDNA sequences with those in the gene bank as described above, revealed no significant homologies to the sequences provided in SEQ ID NO: 62 and 67. The sequences of SEQ ID NO: 61, 63-66, 68 and 69 were found to show some homology to previously isolated ESTs and the sequence provided in SEQ ID NO: 70 was found to show some homology to a previously identified rat gene.

[0724] In further studies, the subtraction procedure described above was repeated using the above lung squamous cell carcinoma cDNA library as the tracer DNA, and a cDNA library from a pool of normal lung, kidney, colon, pancreas, brain, resting PBMC, heart, skin and esophagus as the driver DNA, with esophagus cDNAs making up one third of the driver material. Since esophagus is enriched in normal epithelial cells, including differentiated squamous cells, this procedure is likely to enrich genes that are tumor specific rather than tissues specific. The cDNA sequences of 48 clones determined in this subtraction are provided in SEQ ID NO: 177-224. The sequences of SEQ ID NO: 177, 178, 180, 181, 183, 187, 192, 195-197, 208, 211, 212, 215, 216, 218 and 219 showed some homology to previously identified genes. The sequences of SEQ ID NO: 179, 182, 184-186, 188-191, 193, 194, 198-207, 209, 210, 213, 214, 217, 220 and 224 showed some homology to previously determined ESTs. The sequence of SEQ ID NO: 221-223 showed no homology to any previously determined sequence.

[0725] B. Isolation of cDNA Sequences From a Lung Adenocarcinoma Library

[0726] A human lung adenocarcinoma cDNA expression library was constructed as described above. The library contained 3.2×10⁶ independent colonies, with 100% of clones having an insert and the average insert size being 1500 base pairs. Library subtraction was performed as described above using the normal lung and normal liver and heart cDNA expression libraries described above as the driver DNA. Twenty-six hundred independent clones were recovered.

[0727] Initial cDNA sequence analysis from 100 independent clones revealed many ribosomal protein genes. The cDNA sequences for fifteen clones isolated in this subtraction are provided in SEQ ID NO: 71-86. Comparison of these sequences with those in the gene bank as described above revealed no significant homologies to the sequence provided in SEQ ID NO: 84. The sequences of SEQ ID NO: 71, 73, 74, 77, 78 and 80-82 were found to show some homology to previously isolated ESTs, and the sequences of SEQ ID NO: 72, 75, 76, 79, 83 and 85 were found to show some homology to previously identified human genes.

[0728] In further studies, a cDNA library (referred to as mets3616A) was constructed from a metastatic lung adenocarcinoma. The determined cDNA sequences of 25 clones sequenced at random from this library are provided in SEQ ID NO: 255-279. The mets3616A cDNA library was subtracted against a cDNA library prepared from a pool of normal lung, liver, pancreas, skin, kidney, brain and resting PBMC. To increase the specificity of the subtraction, the driver was spiked with genes that were determined to be most abundant in the mets3616A cDNA library, such as EF1-alpha, integrin-beta and anticoagulant protein PP4, as well as with cDNAs that were previously found to be differentially expressed in subtracted lung adenocarcinoma cDNA libraries. The determined cDNA sequences of 51 clones isolated from the subtracted library (referred to as mets3616A—S1) are provided in SEQ ID NO: 280-330.

[0729] Comparison of the sequences of SEQ ID NO: 255-330 with those in the public databases revealed no significant homologies to the sequences of SEQ ID NO: 255-258, 260, 262-264, 270, 272, 275, 276, 279, 281, 287, 291, 296, 300 and 310. The sequences of SEQ ID NO: 259, 261, 265-269, 271, 273, 274, 277, 278, 282-285, 288-290, 292, 294, 297-299, 301, 303-309, 313, 314, 316, 320-324 and 326-330 showed some homology to previously identified gene sequences, while the sequences of SEQ ID NO: 280, 286, 293, 302, 310, 312, 315, 317-319 and 325 showed some homology to previously isolated expressed sequence tags (ESTs).

### Example 2

### Determination of Tissue Specificity of Lung Tumor Polypeptides

[0730] Using gene specific primers, mRNA expression levels for seven representative lung tumor polypeptides described in Example 1 were examined in a variety of normal and tumor tissues using RT-PCR.

[0731] Briefly, total RNA was extracted from a variety of normal and tumor tissues using Trizol reagent as described above. First strand synthesis was carried out using 2 μg of total RNA with SuperScript II reverse transcriptase (BRL Life Technologies) at 42° C. for one hour. The cDNA was then amplified by PCR with gene-specific primers. To ensure the semi-quantitative nature of the RT-PCR, β-actin was used as an internal control for each of the tissues examined. 1 μl of 1:30 dilution of cDNA was employed to enable the linear range amplification of the β-actin template and was sensitive enough to reflect the differences in the initial copy numbers. Using these conditions, the β-actin levels were determined for each reverse transcription reaction from each tissue. DNA contamination was minimized by DNase treatment and by assuring a negative PCR result when using first strand cDNA that was prepared without adding reverse transcriptase.

[0732] mRNA Expression levels were examined in five different types of tumor tissue (lung squamous cell carcinoma from 3 patients, lung adenocarcinoma, colon tumor from 2 patients, breast tumor and prostate tumor), and thirteen different normal tissues (lung from 4 donors, prostate, brain, kidney, liver, ovary, skeletal muscle, skin, small intestine, stomach, myocardium, retina and testes). Using a 10-fold amount of cDNA, the antigen LST-S1-90 (SEQ ID NO: 3) was found to be expressed at high levels in lung squamous cell carcinoma and in breast tumor, and at low to undetectable levels in the other tissues examined.

[0733] The antigen LST-S2-68 (SEQ ID NO: 15) appears to be specific to lung and breast tumor, however, expression was also detected in normal kidney. Antigens LST-S1-169 (SEQ ID NO: 6) and LST-S1-133 (SEQ ID NO: 5) appear to be very abundant in lung tissues (both normal and tumor), with the expression of these two genes being decreased in most of the normal tissues tested. Both LST-S1-169 and LST-S1-133 were also expressed in breast and colon tumors. Antigens LST-S1-6 (SEQ ID NO: 7) and LST-S2-I2-5F (SEQ ID NO: 47) did not show tumor or tissue specific expression, with the expression of LST-S1-28 being rare and only detectable in a few tissues. The antigen LST-S3-7 (SEQ ID NO: 63) showed lung and breast tumor specific expression, with its message only being detected in normal testes when the PCR was performed for 30 cycles. Lower level expression was detected in some normal tissues when the cycle number was increased to 35. Antigen LST-S3-13 (SEQ ID NO: 66) was found to be expressed in 3 out of 4 lung tumors, one breast tumor and both colon tumor samples. Its expression in normal tissues was lower compared to tumors, and was only detected in 1 out of 4 normal lung tissues and in normal tissues from kidney, ovary and retina. Expression of antigens LST-S3-4 (SEQ ID NO: 62) and LST-S3-14 (SEQ ID NO: 67) was rare and did not show any tissue or tumor specificity. Consistent with Northern blot analyses, the RT-PCR results on antigen LAT-S1-A-10A (SEQ ID NO: 78) suggested that its expression is high in lung, colon, stomach and small intestine tissues, including lung and colon tumors, whereas its expression was low or undetectable in other tissues.

[0734] A total of 2002 cDNA fragments isolated in lung subtractions I, II and III, described above, were colony PCR amplified and their mRNA expression levels in lung tumor, normal lung, and various other normal and tumor tissues were determined using microarray technology (Synteni, Palo Alto, Calif.). Briefly, the PCR amplification products were dotted onto slides in an array format, with each product occupying a unique location in the array. mRNA was extracted from the tissue sample to be tested, reverse transcribed, and fluorescent-labeled cDNA probes were generated. The microarrays were probed with the labeled cDNA probes, the slides scanned and fluorescence intensity was measured. This intensity correlates with the hybridization intensity. Seventeen non-redundant cDNA clones showed over-expression in lung squamous tumors, with expression in normal tissues tested (lung, skin, lymph node, colon, liver, pancreas, breast, heart, bone marrow, large intestine, kidney, stomach, brain, small intestine, bladder and salivary gland) being either undetectable, or 10-fold less compared to lung squamous tumors. The determined cDNA sequences for the clone L513S are provided in SEQ ID NO: 87 and 88; those for L514S are provided in SEQ ID NO: 89 and 90; those for L516S in SEQ ID NO: 91 and 92; that for L517S in SEQ ID NO: 93; that for L519S in SEQ ID NO: 94; those for L520S in SEQ ID NO: 95 and 96; those for L521S in SEQ ID NO: 97 and 98; that for L522S in SEQ ID NO: 99; that for L523S in SEQ ID NO: 100; that for L524S in SEQ ID NO: 101; that for L525S in SEQ ID NO: 102; that for L526S in SEQ ID NO: 103; that for L527S in SEQ ID NO: 104; that for L528S in SEQ ID NO: 105; that for L529S in SEQ ID NO: 106; and those for L530S in SEQ ID NO: 107 and 108. Additionally, the full-length cDNA sequence for L530S is provided in SEQ ID NO: 151, with the corresponding amino acid sequence being provided in SEQ ID NO: 152. L530S shows homology to a splice variant of a p53 tumor suppressor homologue, p63. The cDNA sequences of 7 known isoforms of p63 are provided in SEQ ID NO: 331-337, with the corresponding amino acid sequences being provided in SEQ ID NO: 338-344, respectively.

[0735] Due to polymorphisms, the clone L531S appears to have two forms. A first determined full-length cDNA sequence for L531S is provided in SEQ ID NO: 109, with the corresponding amino acid sequence being provided in SEQ ID NO: 10. A second determined full-length cDNA sequence for L531S is provided in SEQ ID NO: 111, with the corresponding amino acid sequence being provided in SEQ ID NO: 112. The sequence of SEQ ID NO: 111 is identical to that of SEQ ID NO: 109, except that it contains a 27 bp insertion. Similarly, L514S has two alternatively spliced forms; the first variant cDNA is listed as SEQ ID NO: 153, with the corresponding amino acid sequence being provided in SEQ ID NO: 155. The full-length cDNA for the second variant form of L514S is provided in SEQ ID NO: 154, with the corresponding amino acid sequence being provided in SEQ ID NO: 156.

[0736] Full length cloning for L524S (SEQ ID NO: 101) yielded two variants (SEQ ID NO: 163 and 164) with the corresponding amino acid sequences of SEQ ID NO: 165 and 166, respectively. Both variants have been shown to encode parathyroid hormone-related peptide.

[0737] Attempts to isolate the full-length cDNA for L519S, resulted in the isolation of the extended cDNA sequence provided in SEQ ID NO: 173, which contains a potential open reading frame. The amino acid sequence encoded by the sequence of SEQ ID NO: 173 is provided in SEQ ID NO: 174. Additionally, the full-length cDNA sequence for the clone of SEQ ID NO: 100 (known as L523S), a known gene, is provided in SEQ ID NO: 175, with the corresponding amino acid sequence being provided in SEQ ID NO: 176. In further studies, a full-length cDNA sequence for L523S was isolated from a L523S-positive tumor cDNA library by PCR amplification using gene specific primers designed from the sequence of SEQ ID NO: 175. The determined full-length cDNA sequence is provided in SEQ ID NO: 347. The amino acid sequence encoded by this sequence is provided in SEQ ID NO: 348. This protein sequence differs from the previously published protein sequence at two amino acid positions, namely at positions 158 and 410.

[0738] Comparison of the sequences of L514S and L531 S (SEQ ID NO: 87 and 88, and 109, respectively) with those in the gene bank, as described above, revealed no significant homologies to known sequences. The sequences of L513S, L516S, L517S, L519S, L520S and L530S (SEQ ID NO: 87 and 88, 91 and 92, 93, 94, 95 and 96, 107 and 108, respectively) were found to show some homology to previously identified ESTs. The sequences of L521S, L522S, L523S, L524S, L525S, L526S, L527S, L528S and L529S (SEQ ID NO: 97 and 98, 99, 99, 101, 102, 103, 104, 105, and 106, respectively) were found to represent known genes. The determined full-length cDNA sequence for L520S is provided in SEQ ID NO: 113, with the corresponding amino acid sequence being provided in SEQ ID NO: 114. Subsequent microarray analysis showed L520S to be overexpressed in breast tumors in addition to lung squamous tumors.

[0739] Further analysis demonstrated that L529S (SEQ ID NO: 106 and 115), L525S (SEQ ID NO: 102 and 120) and L527S (SEQ ID NO: 104) are cytoskeletal components and potentially squamous cell specific proteins. L529S is connexin 26, a gap junction protein. It was found to be highly expressed in one lung squamous tumor, referred to as 9688T, and moderately over-expressed in two others. However, lower level expression of connexin 26 is also detectable in normal skin, colon, liver and stomach. The over-expression of connexin 26 in some breast tumors has been reported and a mutated form of L529S may result in over-expression in lung tumors. L525S is plakophilin 1, a desmosomal protein found in plaque-bearing adhering junctions of the skin. Expression levels for L525S mRNA was highly elevated in three out of four lung squamous tumors tested, and in normal skin. L527S has been identified as keratin 6 isoform, type II 58 Kd keratin and cytokeratin 13, and shows over-expression in squamous tumors and low expression in normal skin, breast and colon tissues. Keratin and keratin-related genes have been extensively documented as potential markers for lung cancer including CYFRA2.1 (Pastor, A., et al, Eur. Respir. J., 10:603-609, 1997). L513S (SEQ ID NO: 87 and 88) shows moderate over-expression in several tumor tissues tested, and encodes a protein that was first isolated as a pemphigus vulgaris antigen.

[0740] L520S (SEQ ID NO: 95 and 96) and L521S (SEQ ID NO: 97 and 98) are highly expressed in lung squamous tumors, with L520S being up-regulated in normal salivary gland and L521S being over-expressed in normal skin. Both belong to a family of small proline rich proteins and represent markers for fully differentiated squamous cells. L521 S has been described as a specific marker for lung squamous tumor (Hu, R., et al, Lung Cancer, 20:25-30, 1998). L515S (SEQ ID NO: 162) encodes IGF-β2 and L516S is an aldose reductase homologue. Both are moderately expressed in lung squamous tumors and in normal colon. Notably, L516S (SEQ ID NO: 91 and 92) is up-regulated in metastatic tumors but not primary lung adenocarcinoma, an indication of its potential role in metatasis and a potential prognostic marker. L522S (SEQ ID NO: 99) is moderately over-expressed in lung squamous tumors with minimum expression in normal tissues. L522S has been shown to belong to a class IV alcohol dehydrogenase, ADH7, and its expression profile suggests it is a squamous cell specific antigen. L523S (SEQ ID NO: 100) is moderately over-expressed in lung squamous tumor, human pancreatic cancer cell lines and pancreatic cancer tissues, suggesting this gene may be a shared antigen between pancreatic and lung squamous cell cancer.

[0741] L524S (SEQ ID NO: 101) is over-expressed in the majority of squamous tumors tested and is homologous with parathyroid hormone-related peptide (PTHrP), which is best known to cause humoral hypercalcaemia associated with malignant tumors such as leukemia, prostate and breast cancer. It is also believed that PTHrP is most commonly associated with squamous carcinoma of lung and rarely with lung adenocarcinoma (Davidson, L. A., et al, J. Pathol., 178: 398-401, 1996). L528S (SEQ ID NO: 105) is highly over-expressed in two lung squamous tumors with moderate expression in two other squamous tumors, one lung adenocarcinoma and some normal tissues, including skin, lymph nodes, heart, stomach and lung. It encodes the NMB gene that is similar to the precursor of melanocyte specific gene Pme117, which is reported to be preferentially expressed in low-metastatic potential melanoma cell lines. This suggests that L528S may be a shared antigen in both melanoma and lung squamous cell carcinoma. L526S (SEQ ID NO: 103) was overexpressed in all lung squamous cell tumor tissues tested and has been shown to share homology with a gene (ATM) in which a mutation causes ataxia telangiectasia, a genetic disorder in humans causing a predisposition to cancer, among other symptoms. ATM encodes a protein that activates a p53 mediated cell-cycle checkpoint through direct binding and phosphorylation of the p53 molecule. Approximately 40% of lung cancers are associated with p53 mutations, and it is speculated that over-expression of ATM is a result of compensation for loss of p53 function, but it is unknown whether over-expression is the cause of result of lung squamous cell carcinoma. Additionally, expression of L526S (ATM) is also detected in a metastatic but not lung adenocarcinoma, suggesting a role in metastasis.

[0742] Expression of L523S (SEQ ID NO: 175), was examined by real time RT-PCR as described above. In a first study using a panel of lung squamous tumors, L523S was found to be expressed in 4/7 lung squamous tumors, 2/3 head and neck squamous tumors and 2/2 lung adenocarcinomas, with low level expression being observed in skeletal muscle, soft palate and tonsil. In a second study using a lung adenocarcinoma panel, expression of L523S was observed in 4/9 primary adenocarcinomas, 2/2 lung pleural effusions, 1/1 metastatic lung adenocarcinomas and 2/2 lung squamous tumors, with little expression being observed in normal tissues.

[0743] Expression of L523S in lung tumors and various normal tissues was also examined by Northern blot analysis, using standard techniques. In a first study, L523S was found to be expressed in a number of lung adenocarcinomas and squamous cell carcinomas, as well as normal tonsil. No expression was observed in normal lung. In a second study using a normal tissue blot (referred to as HB-12) from Clontech, no expression was observed in brain, skeletal muscle, colon, thymus, spleen, kidney, liver, small intestine, lung or PBMC, although there was strong expression in placenta.

### Example 3

### Isolation and Characterization of Lung Tumor Polypeptides by PCR-Based Subtraction

[0744] Eight hundred and fifty seven clones from a cDNA subtraction library, containing cDNA from a pool of two human lung squamous tumors subtracted against eight normal human tissue cDNAs including lung, PBMC, brain, heart, kidney, liver, pancreas, and skin, (Clontech, Palo Alto, Calif.) were derived and submitted to a first round of PCR amplification. This library was subjected to a second round of PCR amplification, following the manufacturer's protocol. The resulting cDNA fragments were subcloned into the P7-Adv vector (Clontech, Palo Alto, Calif.) and transformed into DH5α E. coli (Gibco, BRL). DNA was isolated from independent clones and sequenced using a Perkin Elmer/Applied Biosystems Division Automated Sequencer Model 373A.

[0745] One hundred and sixty two positive clones were sequenced. Comparison of the DNA sequences of these clones with those in the EMBL and GenBank databases, as described above, revealed no significant homologies to 13 of these clones, hereinafter referred to as Contigs 13, 16, 17, 19, 22, 24, 29, 47, 49, 56-59. The determined cDNA sequences for these clones are provided in SEQ ID NO: 125, 127-129, 131-133, 142, 144, 148-150, and 157, respectively. Contigs 1, 3-5,7-10, 12, 11, 15, 20, 31, 33, 38, 39, 41, 43, 44, 45, 48, 50, 53, 54 (SEQ ID NO: 115-124, 126, 130, 134-141, 143, 145-147, respectively) were found to show some degree of homology to previously identified DNA sequences. Contig 57 (SEQ ID NO:149) was found to represent the clone L519S (SEQ ID NO: 94) disclosed in U.S. patent application Ser. No. 09/123,912, filed Jul. 27, 1998. To the best of the inventors' knowledge, none of these sequences have been previously shown to be differentially over-expressed in lung tumors.

[0746] mRNA expression levels for representative clones in lung tumor tissues, normal lung tissues (n=4), resting PBMC, salivary gland, heart, stomach, lymph nodes, skeletal muscle, soft palate, small intestine, large intestine, bronchial, bladder, tonsil, kidney, esophagus, bone marrow, colon, adrenal gland, pancreas, and skin (all derived from human) were determined by RT-PCR as described above. Expression levels using microarray technology, as described above, were examined in one sample of each tissue type unless otherwise indicated.

[0747] Contig 3 (SEQ ID NO: 116) was found to be highly expressed in all head and neck squamous cell tumors tested (17/17), and expressed in the majority (8/12) of lung squamous tumors, (high expression in 7/12, moderate in 2/12, and low in 2/12), while showing negative expression for 2/4 normal lung tissues and low expression in the remaining two samples. Contig 3 showed moderate expression in skin and soft palate, and lowered expression levels in resting PBMC, large intestine, salivary gland, tonsil, pancreas, esophagus, and colon. Contig 11 (SEQ ID NO: 124) was found to be expressed in all head and neck squamous cell tumors tested (17/17), with high levels of expression being seen in 14/17 tumors, and moderately levels of expression being seen in 3/17 tumors. Additionally, high expression was seen in 3/12 lung squamous tumors and moderate expression in 4/12 lung squamous tumors. Contig 11 was negative for 3/4 normal lung samples, with the remaining sample having only low expression. Contig 11 showed low to moderate reactivity to salivary gland, soft palate, bladder, tonsil, skin, esophagus, and large intestine. Contig 13 (SEQ ID NO: 125) was found to be expressed in all head and neck squamous cell tumors tested (17/17), with high expression in 12/17, and moderate expression in 5/17. Contig 13 was expressed in 7/12 lung squamous tumors, with high expression in 4/12 and moderate expression in three samples. Analysis of normal lung samples showed negative expression for 2/4 and low to moderate expression in the remaining two samples. Contig 13 showed low to moderate reactivity to resting PBMC, salivary gland, bladder, pancreas, tonsil, skin, esophagus, and large intestine, as well as high expression in soft palate. Subsequent full-length cloning efforts revealed that contig 13 (also known as L761P) maps to the 3′ untranslated region of the hSec10p gene. The full-length sequence for this gene is set forth in SEQ ID NO: 368, and encodes the protein set forth in SEQ ID NO: 369.

[0748] Contig 16 (SEQ ID NO: 127) was found to be moderately expressed in several head and neck squamous cell tumors (6/17) and one lung squamous tumor, while showing no expression in any normal lung samples tested. Contig 16 showed low reactivity to resting PBMC, large intestine, skin, salivary gland, and soft palate. Contig 17 (SEQ ID NO: 128) was shown to be expressed in all head and neck squamous cell tumors tested (17/17) (highly expressed in 5/17, and moderately expressed in 12/17). Determination of expression levels in lung squamous tumors showed one tumor sample with high expression and 3/12 with moderate levels. Contig 17 was negative for 2/4 normal lung samples, with the remaining samples having only low expression. Additionally, low level expression was found in esophagus and soft palate. Contig 19 (SEQ ID NO: 129) was found to be expressed in most head and neck squamous cell tumors tested (11/17); with two samples having high expression levels, 6/17 showing moderate expression, and low expression being found in 3/17. Testing in lung squamous tumors revealed only moderate expression in 3/12 samples. Expression levels in 2/4 of normal lung samples were negative, the two other samples having only low expression. Contig 19 showed low expression levels in esophagus, resting PBMC, salivary gland, bladder, soft palate and pancreas.

[0749] Contig 22 (SEQ ID NO: 131), was shown to be expressed in most head and neck squamous cell tumors tested (13/17) with high expression in four of these samples, moderate expression in 6/17, and low expression in 3/17. Expression levels in lung squamous tumors were found to be moderate to high for 3/12 tissues tested, with negative expression in two normal lung samples and low expression in two other samples (n=4). Contig 22 showed low expression in skin, salivary gland and soft palate. Similarly, Contig 24 (SEQ ID NO: 132) was found to be expressed in most head and neck squamous cell tumors tested (13/17) with high expression in three of these samples, moderate expression in 6/17, and low expression in 4/17. Expression levels in lung squamous tumors were found to be moderate to high for 3/12 tissues tested, with negative expression for three normal lung samples and low expression in one sample (n=4). Contig 24 showed low expression in skin, salivary gland and soft palate. Contig 29 (SEQ ID NO: 133) was expressed in nearly all head and neck squamous cell tumors tested (16/17): highly expressed in 4/17, moderately expressed in 11/17, with low expression in one sample. Also, it was moderately expressed in 3/12 lung squamous tumors, while being negative for 2/4 normal lung samples. Contig 29 showed low to moderate expression in large intestine, skin, salivary gland, pancreas, tonsil, heart and soft palate. Contig 47 (SEQ ID NO: 142) was expressed in most head and neck squamous cell tumors tested (12/17): moderate expression in 10/17, and low expression in two samples. In lung squamous tumors, it was highly expressed in one sample and moderately expressed in two others (n=13). Contig 47 was negative for 2/4 normal lung samples, with the remaining two samples having moderate expression. Also, Contig 47 showed moderate expression in large intestine, and pancreas, and low expression in skin, salivary gland, soft palate, stomach, bladder, resting PBMC, and tonsil.

[0750] Contig 48 (SEQ ID NO: 143) was expressed in all head and neck squamous cell tumors tested (17/17): highly expressed in 8/17 and moderately expressed in 7/17, with low expression in two samples. Expression levels in lung squamous tumors were high to moderate in three samples (n=13). Contig 48 was negative for one out of four normal lung samples, the remaining showing low or moderate expression. Contig 48 showed moderate expression in soft palate, large intestine, pancreas, and bladder, and low expression in esophagus, salivary gland, resting PBMC, and heart. Contig 49 (SEQ ID NO: 144) was expressed at low to moderate levels in 6/17 head and neck squamous cell tumors tested. Expression levels in lung squamous tumors were moderate in three samples (n=13). Contig 49 was negative for 2/4 normal lung samples, the remaining samples showing low expression. Moderate expression levels in skin, salivary gland, large intestine, pancreas, bladder and resting PBMC were shown, as well as low expression in soft palate, lymph nodes, and tonsil. Contig 56 (SEQ ID NO: 148) was expressed in low to moderate levels in 3/17 head and neck squamous cell tumors tested, and in lung squamous tumors, showing low to moderate levels in three out of thirteen samples. Notably, low expression levels were detected in one adenocarcinoma lung tumor sample (n=2). Contig 56 was negative for 3/4 normal lung samples, and showed moderate expression levels in only large intestine, and low expression in salivary gland, soft palate, pancreas, bladder, and resting PBMC. Contig 58, also known as L769P, (SEQ ID NO: 150) was expressed at moderate levels in 11/17 head and neck squamous cell tumors tested and low expression in one additional sample. Expression in lung squamous tumors showed low to moderate levels in three out of thirteen samples. Contig 58 was negative for 3/4 normal lung samples, with one sample having low expression. Moderate expression levels in skin, large intestine, and resting PBMC were demonstrated, as well as low expression in salivary gland, soft palate, pancreas, and bladder. Contig 59 (SEQ ID NO: 157) was expressed in some head, neck, and lung squamous tumors. Low level expression of Contig 59 was also detected in salivary gland and large intestine.

[0751] The full-length cDNA sequence for Contig 22, also referred to as L763P, is provided in SEQ ID NO: 158, with the corresponding amino acid sequence being provided in SEQ ID NO: 159. Real-time RT-PCR analysis of L763P revealed that it is highly expressed in 3/4 lung squamous tumors as well as 4/4 head and neck squamous tumors, with low level expression being observed in normal brain, skin, soft pallet and trachea. Subsequent database searches revealed that the sequence of SEQ ID NO: 158 contains a mutation, resulting in a frameshift in the corresponding protein sequence. A second cDNA sequence for L763P is provided in SEQ ID NO: 345, with the corresponding amino acid sequence being provided in SEQ ID NO: 346. The sequences of SEQ ID NO: 159 and 346 are identical with the exception of the C-terminal 33 amino acids of SEQ ID NO: 159.

[0752] The full-length cDNA sequence incorporating Contigs 17, 19, and 24, referred to as L762P, is provided in SEQ ID NO: 160, with the corresponding amino acid sequence being provided in SEQ ID NO: 161. Further analysis of L762P has determined it to be a type I membrane protein and two additional variants have been sequenced. Variant I (SEQ ID NO: 167, with the corresponding amino acid sequence in SEQ ID NO: 169) is an alternatively spliced form of SEQ ID NO: 160 resulting in deletion of 503 nucleotides, as well as deletion of a short segment of the expressed protein. Variant 2 (SEQ ID NO: 168, with the corresponding amino acid sequence in SEQ ID NO: 170) has a two nucleotide deletion at the 3′ coding region in comparison to SEQ ID NO: 160, resulting in a secreted form of the expressed protein. Real-time RT-PCR analysis of L762P revealed that is over-expressed in 3/4 lung squamous tumors and 4/4 head & neck tumors, with low level expression being observed in normal skin, soft pallet and trachea.

[0753] An epitope of L762P was identified as having the sequence KPGHWTYTLNNTHHSLQALK (SEQ ID NO: 382), which corresponds to amino acids 571-590 of SEQ ID NO: 161.

[0754] The full-length cDNA sequence for contig 56 (SEQ ID NO: 148), also referred to as L773P, is provided in SEQ ID NO: 171, with the amino acid sequence in SEQ ID NO: 172. L773P was found to be identical to dihydroxyl dehydrogenase at the 3′ portion of the gene, with divergent 5′ sequence. As a result, the 69 N-terminal amino acids are unique. The cDNA sequence encoding the 69 N-terminal amino acids is provided in SEQ ID NO: 349, with the N-terminal amino acid sequence being provided in SEQ ID NO: 350. Real-time PCR revealed that L773P is highly expressed in lung squamous tumor and lung adenocarcinoma, with no detectable expression in normal tissues. Subsequent Northern blot analysis of L773P demonstrated that this transcript is differentially over-expressed in squamous tumors and detected at approximately 1.6 Kb in primary lung tumor tissue and approximately 1.3 Kb in primary head and neck tumor tissue.

[0755] Subsequent microarray analysis has shown Contig 58, also referred to as L769S (SEQ ID NO: 150), to be overexpressed in breast tumors in addition to lung squamous tumors.

### Example 4

### Isolation and Characterization of Lung Tumor Polypeptides by PCR-Based Subtraction

[0756] Seven hundred and sixty clones from a cDNA subtraction library, containing cDNA from a pool of two human lung primary adenocarcinomas subtracted against a pool of nine normal human tissue cDNAs including skin, colon, lung, esophagus, brain, kidney, spleen, pancreas and liver, (Clontech, Palo Alto, Calif.) were derived and submitted to a first round of PCR amplification. This library (referred to as ALT-1) was subjected to a second round of PCR amplification, following the manufacturer's protocol. The expression levels of these 760 cDNA clones in lung tumor, normal lung, and various other normal and tumor tissues, were examined using microarray technology (Incyte, Palo Alto, Calif.). Briefly, the PCR amplification products were dotted onto slides in an array format, with each product occupying a unique location in the array. mRNA was extracted from the tissue sample to be tested, reverse transcribed, and fluorescent-labeled cDNA probes were generated. The microarrays were probed with the labeled cDNA probes, the slides scanned and fluorescence intensity was measured. This intensity correlates with the hybridization intensity. A total of 118 clones, of which 55 were unique, were found to be over-expressed in lung tumor tissue, with expression in normal tissues tested (lung, skin, lymph node, colon, liver, pancreas, breast, heart, bone marrow, large intestine, kidney, stomach, brain, small intestine, bladder and salivary gland) being either undetectable, or at significantly lower levels. One of these clones, having the sequence as provided in SEQ ID NO:420 (clone #19014), shows homology to a previously identified clone, L773P. Clone L773P has the full-length cDNA sequence provided in SEQ ID NO:171 and the amino acid sequence provided in SEQ ID NO:172 The isolation of clone #19014 is also described in co-pending U.S. patent application Ser. No. 09/285,479, filed Apr. 2, 1999.

### Example 5

### Synthesis of Polypeptides

[0757] Polypeptides may be synthesized on a Perkin Elmer/Applied Biosystems Division 430A peptide synthesizer using FMOC chemistry with HPTU (O-Benzotriazole-N,N,N′,N′-tetramethyluronium hexafluorophosphate) activation. A Gly-Cys-Gly sequence may be attached to the amino teiminus of the peptide to provide a method of conjugation, binding to an immobilized surface, or labeling of the peptide. Cleavage of the peptides from the solid support is carried out using the following cleavage mixture: trifluoroacetic acid:ethanedithiol:thioanisole:water:phenol (40:1:2:2:3). After cleaving for 2 hours, the peptides are precipitated in cold methyl-t-butyl-ether. The peptide pellets are then dissolved in water containing 0.1% trifluoroacetic acid (TFA) and lyophilized prior to purification by C18 reverse phase HPLC. A gradient of 0%-60% acetonitrile (containing 0.1% TFA) in water (containing 0.1% TFA) may be used to elute the peptides. Following lyophilization of the pure fractions, the peptides are characterized using electrospray or other types of mass spectrometry and by amino acid analysis.

### Example 6

### Preparation of Antibodies Against Lung Cancer Antigens

[0758] Polyclonal antibodies against the lung cancer antigens L514S, L528S, L531S, L523 and L773P (SEQ ID NO: 155, 225, 112, 176 and 171, respectively) were prepared as follows.

[0759] Rabbits were immunized with recombinant protein expressed in and purified from E. coli as described below. For the initial immunization, 400 μg of antigen combined with muramyl dipeptide (MDP) was injected subcutaneously (S.C.). Animals were boosted S.C. 4 weeks later with 200 μg of antigen mixed with incomplete Freund's Adjuvant (IFA). Subsequent boosts of 100 μg of antigen mixed with IFA were injected S.C. as necessary to induce high antibody titer responses. Serum bleeds from immunized rabbits were tested for antigen-specific reactivity using ELISA assays with purified protein. Polyclonal antibodies against L514S, L528S, L531S, L523S and L773P were affinity purified from high titer polyclonal sera using purified protein attached to a solid support.

[0760] Immunohistochemical analysis using polyclonal antibodies against L514S was performed on a panel of 5 lung tumor samples, 5 normal lung tissue samples and normal colon, kidney, liver, brain and bone marrow. Specifically, tissue samples were fixed in formalin solution for 24 hours and embedded in paraffin before being sliced into 10 micron sections. Tissue sections were permeabilized and incubated with antibody for 1 hr. HRP-labeled anti-mouse followed by incubation with DAB chromogen was used to visualize L514S immunoreactivity. L514S was found to be highly expressed in lung tumor tissue with little or no expression being observed in normal lung, brain or bone marrow. Light staining was observed in colon (epithelial crypt cells positive) and kidney (tubules positive). Staining was seen in normal liver but no mRNA has been detected in this tissue making this result suspect.

[0761] Using the same procedure, immunohistochemical analysis using polyclonal antibodies against L528S demonstrated staining in lung tumor and normal lung samples, light staining in colon and kidney, and no staining in liver and heart.

[0762] Immunohistochemical analysis using polyclonal antibodies against L531S demonstrated staining in lung tumor samples, light membrane staining in most normal lung samples, epithelial staining in colon, tubule staining in kidney, ductal epithelial staining in liver and no staining in heart.

[0763] Immunohistochemical analysis using polyclonal antibodies against L523S demonstrated staining in all lung cancer samples tested but no staining in normal lung, kidney, liver, colon, bone marrow or cerebellum.

[0764] Generation of polyclonal anti-sera against L762P (SEQ ID NO: 169 and 170) was performed as follows. 400 micrograms of lung antigen was combined with 100 micrograms of muramyldipeptide (MDP). An equal volume of Incomplete Freund's Adjuvant (IFA) was added and then mixed until an emulsion was formed. Rabbits were injected subcutaneously (S.C.). After four weeks the animals were injected S.C. with 200 micrograms of antigen mixed with an equal volume of IFA. Every four weeks animals were boosted with 100 micrograms of antigen. Seven days following each boost the animal was bled. Sera was generated by incubating the blood at 4° C. for 12-24 hours followed by centrifugation.

[0765] Characterization of polyclonal antisera was carried out as follows. Ninety-six well plates were coated with antigen by incubing with 50 microliters (typically 1 microgram) at 4° C. for 20 hrs. 250 microliters of BSA blocking buffer was added to the wells and incubated at room temperature for 2 hrs. Plates were washed 6 times with PBS/0.01% Tween. Rabbit sera was diluted in PBSand 50 microliters of diluted sera was added to each well and incubated at room temperature for 30 min. Plates were washed as described above before addition of 50 microliters of goat anti-rabbit horse radish peroxidase (HRP) at a 1:10000 dilution and incubation at room temperature for 30 min. Plates were washed as described above and 100 μl of TMB Microwell Peroxidase Substrate was added to each well. Following a 15 minute incubation in the dark at room temperature, the colorimetric reaction was stopped with 100 μl 1N H₂SO₄ and read immediately at 450 nm. Antisera showed strong reactivity to antigen L762P.

[0766] Immunohistochemical analysis using polyclonal antibodies against L762P demonstrated staining in all lung cancer samples tested, some light staining in the bronchiole epithelium of normal lung, tubule staining in kidney, light epithelial staining in colon and no staining in heart or liver.

[0767] In order to evaluate L773P protein expression in various tissues, immunohistochemistry (1HC) analysis was performed using an affinity purified L773P polyclonal antibody. Briefly, tissue samples were fixed in formalin solution for 12-24 hrs and embedded in paraffin before being sliced into 8 micron sections. Steam heat induced epitope retrieval (SHIER) in 0.1 M sodiuym citrate buffer (pH 6.0) was used for optimal staining conditions. Sections were incubated with 10% serum/PBS for 5 minutes. Primary antibody was added to each section for 25 minutes at indicated concentrations followed by 25 minute incubation with either anti-rabbit or anti-mouse biotinylated antibody. Endogenous peroxidase activitiy was blocked by three 1.5 minute incubations with hydrogen peroxidase. The avidin biotin complex/horse radish peroxidase (ABC/HRP) system was used along with DAB chromogen to visualize L773P expression. Slides were counterstainied with hematoxylin to visualize cell nuclei. Using this approach, L773P protein was detected in 6/8 lung tumors, 4/6 normal lung samples (very light staining in some cases), 1/1 kidney samples (very light staining), 0/1 heart samples, 1/1 colon samples (very light staining) and 0/1 liver samples.

### Example 7

### Peptide Priming of Mice and Propagation of CTL Lines

[0768] Immunogenic peptides from the lung cancer antigen L762P (SEQ ID NO: 161) for HLA-A2/K^{b}-restricted CD8+ T cells were identified as follows.

[0769] The location of HLA-A2 binding peptides within the lung cancer antigen L762P (SEQ ID NO: 161) was predicted using a computer program which predicts peptides sequences likely to being to HLA-A*0201 by fitting to the known peptide binding motif for HLA-A*0201 (Rupert et al. (1993) Cell 74:929; Rammensee et al. (1995) Immunogenetics 41:178-228). A series of 19 synthetic peptides corresponding to a selected subset of the predicted HLA-A*0201 binding peptides was prepared as described above.

[0770] Mice expressing the transgene for human HLA A2/K^{b} (provided by Dr L. Sherman, The Scripps Research Institute, La Jolla, Calif.) were immunized with the synthetic peptides, as described by Theobald et al., Proc. Natl. Acad. Sci. USA 92:11993-11997, 1995, with the following modifications. Mice were immunized with 50 μg of L726P peptide and 120 μg of an I-A^{b} binding peptide derived from hepatitis B virus protein emulsified in incomplete Freund's adjuvant. Three weeks later these mice were sacrificed and single cell suspensions prepared. Cells were then resuspended at 7×10⁶ cells/ml in complete media (RPMI-1640; Gibco BRL, Gaithersburg, Md.) containing 10% FCS, 2 mM Glutamine (Gibco BRL), sodium pyruvate (Gibco BRL), non-essential amino acids (Gibco BRL), 2×10⁻⁵ M 2-mercaptoethanol, 50U/ml penicillin and streptomycin, and cultured in the presence of irradiated (3000 rads) L762P peptide- (5 μg/ml) and 10 mg/ml B₂-microglobulin- (3 μg/ml) LPS blasts (A2 transgenic spleens cells cultured in the presence of 7 μg/ml dextran sulfate and 25 μg/ml LPS for 3 days). After six days, cells (5×10⁵/ml) were restimulated with 2.5×10⁶/ml peptide-pulsed irradiated (20,000 rads) EL4A2 Kb cells (Sherman et al, Science 258:815-818, 1992) and 5×10⁶/ml irradiated (3000 rads) A2/K^{b}-transgenic spleen feeder cells. Cells were cultured in the presence of 10U/ml IL-2. Cells were restimulated on a weekly basis as described, in preparation for cloning the line.

[0771] Peptide-specific cell lines were cloned by limiting dilution analysis with irradiated (20,000 rads) L762P peptide-pulsed EL4 A2/Kb tumor cells (1×10⁴ cells/well) as stimulators and irradiated (3000 rads) A2/K^{b}-transgenic spleen cells as feeders (5×10⁵ cells/well) grown in the presence of 10U/ml IL-2. On day 7, cells were restimulated as before. On day 14, clones that were growing were isolated and maintained in culture.

[0772] Cell lines specific for the peptides L762P-87 (SEQ ID NO: 226; corresponding to amino acids 87-95 of SEQ ID NO: 161), L762P-145 (SEQ ID NO: 227; corresponding to amino acids 145-153 of SEQ ID NO: 161), L762P-585 (SEQ ID NO: 228; corresponding to amino acids 585-593 of SEQ ID NO: 161), L762P-425 (SEQ ID NO: 229; corresponding to amino acids 425-433 of SEQ ID NO: 161), L762P(10)-424 (SEQ ID NO: 230; corresponding to amino acids 424-433 of SEQ ID NO: 161) and L762P(10)-458 (SEQ ID NO: 231; corresponding to amino acids 458-467 of SEQ ID NO: 161) demonstrated significantly higher reactivity (as measured by percent specific lysis) against L762P peptide-pulsed EL4-A2/K^{b} tumor target cells than control peptide-pulsed EL4-A2/K^{b} tumor target cells.

### Example 8

### Identification of CD4 Immunogenic T Cell Epitopes Derived From the Lung Cancer Antigen L762P

[0773] CD4 T cell lines specific for the antigen L762P (SEQ ID NO: 161) were generated as follows.

[0774] A series of 28 overlapping peptides were synthesized that spanned approximately 50% of the L762P sequence. For priming, peptides were combined into pools of 4-5 peptides, pulsed at 20 micrograms/ml into dendritic cells for 24 hours. The dendritic cells were then washed and mixed with positively selected CD4+ T cells in 96 well U-bottomed plates. Forty cultures were generated for each peptide pool. Cultures were restimulated weekly with fresh dendritic cells loaded with peptide pools. Following a total of 3 stimulation cycles, cells were rested for an additional week and tested for specificity to antigen presenting cells (APC) pulsed with peptide pools using interferon-gamma ELISA and proliferation assays. For these assays, adherent monocytes loaded with either the relevant peptide pool or an irrelevant peptide were used as APC. T cell lines that appeared to specifically recognize L762P peptide pools both by cytokine release and proliferation were identified for each pool. Emphasis was placed on identifying T cells with proliferative responses. T cell lines that demonstrated either both L762P-specific cytokine secretion and proliferation, or strong proliferation alone were further expanded to be tested for recognition of individual peptides from the pools, as well as for recognition of recombinant L762P. The source of recombinant L762P was E. coli, and the material was partially purified and endotoxin positive. These studies employed 10 micrograms of individual peptides, 10 or 2 micrograms of an irrelevant peptide, and 2 or 0.5 micrograms of either L762P protein or an irrelevant, equally impure, E. coli generated recombinant protein. Significant interferon-gamma production and CD4 T cell proliferation was induced by a number of L762P-derived peptides in each pool. The amino acid sequences for these peptides are provided in SEQ ID NO: 232-251. These peptides correspond to amino acids 661-680, 676-696, 526-545, 874-893, 811-830, 871-891, 856-875, 826-845, 795-815, 736-755, 706-725, 706-725, 691-710, 601-620, 571-590, 556-575, 616-635, 646-665, 631-650, 541-560 and 586-605, respectively, of SEQ ID NO: 161.

[0775] CD4 T cell lines that demonstrated specificity for individual L762P-derived peptides were further expanded by stimulation with the relevant peptide at 10 micrograms/ml. Two weeks post-stimulation, T cell lines were tested using both proliferation and IFN-gamma ELISA assays for recognition of the specific peptide. A number of previously identified T cells continued to demonstrate L762P-peptide specific activity. Each of these lines was further expanded on the relevant peptide and, following two weeks of expansion, tested for specific recognition of the L762P-peptide in titration experiments, as well as for recognition of recombinant E. coli-derived L762P protein. For these experiments, autologous adherent monocytes were pulsed with either the relevant L762P-derived peptide, an irrelevant mammaglobin-derived peptide, recombinant E. coli-derived L762P (approx. 50% pure), or an irrelevant E. coli-derived protein. The majority of T cell lines were found to show low affinity for the relevant peptide, since specific proliferation and IFN-gamma ratios dramatically decreased as L762P peptide was diluted. However, four lines were identified that demonstrated significant activity even at 0.1 micrograms/ml peptide. Each of these lines (referred to as A/D5, D/F5, E/A7 and E/B6) also appeared to specifically proliferate in response to the E. coli-derived L762P protein preparation, but not in response to the irrelevant protein preparation. The amino acid sequences of the L762P-derived peptides recognized by these lines are provided in SEQ ID NO: 234, 249, 236 and 245, respectively. No protein specific IFN-gamma was detected for any of the lines. Lines A/D5, E/A7 and E/B6 were cloned on autologous adherent monocytes pulsed with the relevant peptide at 0.1 (A/D5 and E/A7) or 1 (D/F5) microgram/ml. Following growth, clones were tested for specificity for the relevant peptide. Numerous clones specific for the relevant peptide were identified for lines A/D5 and E/A7.

### Example 9

### Protein Expression of Lung Tumor-Specific Antigens

[0776] a) Expression of L514S in E. coli

[0777] The lung tumor antigen L514S (SEQ ID NO: 89) was subcloned into the expression vector pE32b at NcoI and NotI sites, and transformed into E. coli using standard techniques. The protein was expressed from residues 3-153 of SEQ ID NO: 89. The expressed amino acid sequence and the corresponding DNA sequence are provided in SEQ ID NO: 252 and 253, respectively.

[0778] b) Expression of L762P

[0779] Amino acids 32-944 of the lung tumor antigen L762P (SEQ ID NO: 161), with a 6× His Tag, were subcloned into a modified pET28 expression vector, using kanamycin resistance, and transformed into BL21 CodonPlus using standard techniques. Low to moderate levels of expression were observed. The determined DNA sequence of the L762P expression construct is provided in SEQ ID NO: 254.

### Example 10

### Identification of MHC Class II Restricting Allele for L762P Peptide-Specific Responses

[0780] A panel of HLA mismatched antigen presenting cells (APC) were used to identify the MHC class II restricting allele for the L762P-peptide specific responses of CD4 T cell clones derived from lines that recognized L762P peptide and recombinant protein. Clones from two lines, AD-5 and EA-7, were tested as described below. The AD-5 derived clones were found to be restricted by the HLA-DRB-1101 allele, and an EA-7 derived clone was found to be restricted by the HLA DRB-0701 or DQB1-0202 allele. Identification of the restriction allele allows targeting of vaccine therapies using the defined peptide to individuals that express the relevant class II allele. Knowing the relevant restricting allele will also enable clinical monitoring for responses to the defined peptide since only individuals that express the relevant allele will be monitored.

[0781] CD4 T cell clones derived from line AD-5 and EA-7 were stimulated on autologous APC pulsed with the specific peptide at 10 μg/ml, and tested for recognition of autologous APC (from donor D72) as well as against a panel of APC partially matched with D72 at class II alleles. Table 2 shows the HLA class typing of the APC tested. Adherent monocytes (generated by 2 hour adherence) from four different donors, referred to as D45, D187, D208, and D326, were used as APC in these experiments. Autologous APC were not included in the experiment. Each of the APC were pulsed with the relevant peptide (5a for AD-5 and 3e for 3A-7) or the irrelevant mammoglobin peptide at 10 μg/ml, and cultures were established for 10,000 T cells and about 20,000 APC/well. As shown in Table 3, specific proliferation and cytokine production could be detected only when partially matched donor cells were used as APC. Based on the MHC typing analysis, these results strongly suggest that the restricting allele for the L762-specific response of the AD-5 derived clones is HLA-DRB-1101 and for the EA-7 derived clone the restricting allele is HLA DRB-0701 or DQB1-0202.

TABLE 2
HLA Typing of APC

| DONOR | DR | DR | DQ | DQ |
|---|---|---|---|---|
| D72 | B1-1101 | B1-0701 | B1-0202 | B1-0301 |
| D45 | −3 | −15 | B1-0201 | B1-0602 |
| D187 | −4 | −15 | −1 | −7 |
| D208 | B1-1101 | B1-0407 | −3 | −3 |
| D326 | B1-0301 | B1-0701 | B1-0202 | B1-0201 |

[0782] TABLE 3
L762P Peptide Responses Map to HLA DR Alleles

| | AD-5 | | | | | | | | | | | |
|---|---|---|---|---|---|---|---|---|---|---|---|---|
| | A11 | | B10 | | C10 | | C11 | | E6 | | F1 | |
| Donor | Prol | γ-IFN | Prol | γ-IFN | Prol | γ-IFN | Prol | γ-IFN | Prol | γ-IFN | Prol | γ-IFN |
| D72 | 46 | | 31 | | 34 | | 24 | | 31 | | 40 | |
| DR-0701, −1101, | | | | | | | | | | | | |
| DQ-0202, −7 | | | | | | | | | | | | |
| D45 | 3.2 | 1.7 | 5.5 | 1.2 | 3.3 | 1 | 1.0 | 1.5 | 1.1 | 1.1 | 1.6 | 1.1 |
| DR-3, −15, | | | | | | | | | | | | |
| DQ-1, −0201 | | | | | | | | | | | | |
| D187 | 1.4 | 1.2 | 1.3 | 1 | 1.4 | 1.1 | 1.4 | 1.7 | 1.0 | 1.1 | 1.4 | 1.2 |
| DR-4, −15, | | | | | | | | | | | | |
| DQ-1, −7 | | | | | | | | | | | | |
| D208 | 138 | 13 | 38 | 5.4 | 18.8 | 10 | 14.6 | 4.6 | 15.3 | 6.1 | 45.9 | 8.6 |
| DR-4, −1101, | | | | | | | | | | | | |
| DQ-3 | | | | | | | | | | | | |
| D326 | 0.7 | 4 | 0.3 | 1 | 0.3 | 1.4 | 1.0 | 2 | 0.8 | 1.1 | 0.3 | 1.1 |
| DR-3, −0701, | | | | | | | | | | | | |
| DQ-0202 | | | | | | | | | | | | |

| | AD-5 | | | | | | | | EA-7 | |
|---|---|---|---|---|---|---|---|---|---|---|
| | F9 | | G8 | | G9 | | G10 | | G12 | |
| Donor | Prol | γ-IFN | Prol | γ-IFN | Prol | γ-IFN | Prol | γ-IFN | Prol | γ-IFN |
| D72 | 55 | | 45 | | 43 | | 91 | | 10 | |
| DR-0701, -1101, | | | | | | | | | | |
| DQ-0202, -7 | | | | | | | | | | |
| D45 | 1.4 | 1.3 | 0.2 | 1.1 | 1.1 | 1.1 | 1.2 | 1.5 | 0.8 | 1.1 |
| DR-3, -15, | | | | | | | | | | |
| DQ-1, -0201 | | | | | | | | | | |
| D187 | 1.2 | 1.1 | 0.9 | 1 | 1.0 | 1 | 1.0 | 1.6 | 0.5 | 1 |
| DR-4, -15, | | | | | | | | | | |
| DQ-1, -7 | | | | | | | | | | |
| D208 | 73.3 | 14.1 | 38.0 | 7.7 | 174.3 | 16.1 | 113.6 | 19.6 | 0.8 | 1 |
| DR-4, -1101, | | | | | | | | | | |
| DQ-3 | | | | | | | | | | |
| D326 | 0.7 | 1.1 | 0.6 | 1.2 | 0.4 | 1 | 1.2 | 5 | 14.1 | 6.8 |
| DR-3, -0701, | | | | | | | | | | |
| DQ-0202 | | | | | | | | | | |

### Example 11

### Fusion Proteins of N-Terminal and C-Terminal Portions of L763P

[0783] In another embodiment, a Mycobacterium tuberculosis-derived polynucleotide, referred to as Ra12, is linked to at least an immunogenic portion of a polynucleotide of this invention. Ra12 compositions and methods for their use in enhancing expression of heterologous polynucleotide sequences are described in U.S. Patent Application No. 60/158,585, the disclosure of which is incorporated herein by reference in its entirety. Briefly, Ra12 refers to a polynucleotide region that is a subsequence of a Mycobacterium tuberculosis MTB32A nucleic acid. MTB32A is a serine protease of 32 KD molecular weight encoded by a gene in virulent and avirulent strains of M. tuberculosis. The nucleotide sequence and amino acid sequence of MTB32A have been described (for example, U.S. Patent Application No. 60/158,585; see also, Skeiky et al., Infection and Immun. (1999) 67:3998-4007, incorporated herein by reference). Surprisingly, it was discovered that a 14 KD C-terminal fragment of the MTB32A coding sequence expresses at high levels on its own and remains as a soluble protein throughout the purification process. Moreover, this fragment may enhance the immunogenicity of heterologous antigenic polypeptides with which it is fused. This 14 KD C-terminal fragment of the MTB32A is referred to herein as Ra12 and represents a fragment comprising some or all of amino acid residues 192 to 323 of MTB32A.

[0784] Recombinant nucleic acids which encode a fusion polypeptide comprising a Ra12 polypeptide and a heterologous lung tumor polypeptide of interest, can be readily constructed by conventional genetic engineering techniques. Recombinant nucleic acids are constructed so that, preferably, a Ra12 polynucleotide sequence is located 5′ to a selected heterologous lung tumor polynucleotide sequence. It may also be appropriate to place a Ra12 polynucleotide sequence 3′ to a selected heterologous polynucleotide sequence or to insert a heterologous polynucleotide sequence into a site within a Ra12 polynucleotide sequence.

[0785] In addition, any suitable polynucleotide that encodes a Ra12 or a portion or other variant thereof can be used in constructing recombinant fusion polynucleotides comprising Ra12 and one or more lung tumor polynucleotides disclosed herein. Preferred Ra12 polynucleotides generally comprise at least about 15 consecutive nucleotides, at least about 30 nucleotides, at least about 60 nucleotides, at least about 100 nucleotides, at least about 200 nucleotides, or at least about 300 nucleotides that encode a portion of a Ra12 polypeptide.

[0786] Ra12 polynucleotides may comprise a native sequence (i.e., an endogenous sequence that encodes a Ra12 polypeptide or a portion thereof) or may comprise a variant of such a sequence. Ra12 polynucleotide variants may contain one or more substitutions, additions, deletions and/or insertions such that the biological activity of the encoded fusion polypeptide is not substantially diminished, relative to a fusion polypeptide comprising a native Ra12 polypeptide. Variants preferably exhibit at least about 70% identity, more preferably at least about 80% identity and most preferably at least about 90% identity to a polynucleotide sequence that encodes a native Ra12 polypeptide or a portion thereof.

[0787] Two specific embodiments of fusions between Ra12 and antigens of the present invention are described in this example.

[0788] A. N-Terminal Portion of L763P

[0789] A fusion protein of full-length Ra12 and the N-terminal portion of L763P (referred to as L763P-N; amino acid residues 1-130 of SEQ ID NO: 159) was expressed as a single recombinant protein in E. coli. The cDNA for the N-terminal portion was obtained by PCR with a cDNA for the full length L763P and primers L763F3 (5′CGGCGAATTCATGGATTGGGGGACGCTGC; SEQ ID NO: 383) and 1763RV3 (5′CGGCCTCGAGTCACCCCTCTATCCGAACCTTCTGC; SEQ ID NO: 384). The PCR product with expected size was recovered from agarose gel, digested with restriction enzymes EcoRI and XhoI, and cloned into the corresponding sites in the expression vector pCRX1. The sequence for the fusion of full-length of Ra12 and L763P-N was confirmed by DNA sequencing. The determined cDNA sequence is provided in SEQ ID NO:351, with the corresponding amino acid sequence being provided in SEQ ID NO: 352).

[0790] B. C-Terminal Portion of L763P

[0791] A fusion protein of full-length Ra12 and the C-terminal portion of L763P (referred to as L763P-C; amino acid residues 100-262 of SEQ ID NO: 159) was expressed as a single recombinant protein in E. coli. The cDNA of the C-terminal portion of L763P was obtained by PCR with a cDNA for the full length of L763P and primers L763F4 (5′ CGGCGAATTCCACGAACCACTCGCAAGTTCAG; SEQ ID NO: 385) and L763RV4 (5′ CGGCTCGAG-TTAGCTTGGGCCTGTGATTGC; SEQ ID NO: 386). The PCR product with expected size was recovered from agarose gel, digested with restriction enzymes EcoRI and XhoI, and cloned into the corresponding sites in the expression vector pCRX1. The sequence for the fusion of full-length Ra12 and L763P-C was confirmed by DNA sequencing. The determined DNA sequence is provided in SEQ ID NO:353, with the corresponding amino acid sequence being provided in SEQ ID NO: 354.

[0792] The recombinant proteins described in this example are useful for the preparation of vaccines, for antibody therapeutics, and for diagnosis of lung tumors.

### Example 12

### Expression in E. Coli of L762P His Tag Fusion Protein

[0793] PCR was performed on the L762P coding region with the following primers:

[0794] Forward primer starting at amino acid 32.

[0795] PDM-278 5′ggagtacagcttcaagacaatggg 3′ (SEQ ID NO:355) Tm 57° C.

[0796] Reverse primer including natural stop codon after amino acid 920, creating EcoRI site

[0797] PDM-280 5′ccatgggaattcattataataattttgttcc 3′ (SEQ ID NO:356) TM55° C.

[0798] The PCR product was digested with EcoRI restriction enzyme, gel purified and then cloned into pPDM His, a modified pET28 vector with a His tag in frame, which had been digested with Eco72I and EcoRI restriction enzymes. The correct construct was confirmed by DNA sequence analysis and then transformed into BL21 (DE3) pLys S and BL21 (DE3) CodonPlus RIL expression hosts.

[0799] The protein sequence of expressed recombinant L762P is shown in SEQ ID NO:357, and the DNA sequence is shown in SEQ ID NO:358.

### Example 13

### Expression in E. Coli of a L773PA His Tag Fusion Protein

[0800] The L773PA coding region (encoding amino acids 2-71 of SEQ ID NO: 172) was PCR amplified using the following primers:

[0801] Forward primer for L773PA starting at amino acid 2:

[0802] PDM-299 5′tggcagcccctcttcttcaagtggc 3′ (SEQ ID NO:359) Tm63° C.

[0803] Reverse primer for L773PA creating artificial stop codon after amino acid 70:

[0804] PDM-355 5′cgccagaattcatcaaacaaatctgttagcacc 3′ (SEQ ID NO:360) Tm62° C.

[0805] The resulting PCR product was digested with EcoRI restriction enzyme, gel purified and then cloned into pPDM His, a modified pET28 vector with a His tag in frame, which had been digested with Eco72I and EcoRI restriction enzymes. The correct construct was confirmed by DNA sequence analysis and transformed into BL21 (DE3) pLys S and BL21 (DE3) CodonPlus RIL expression hosts.

[0806] The protein sequence of expressed recombinant L773PA is shown in SEQ ID NO:361, and the DNA sequence is shown in SEQ ID NO:362.

### Example 14

### Identification of Epitopes Derived From Lung Tumor Specific Polypeptides

[0807] A series of peptides from the L773P amino acid sequence (SEQ ID NO: 172) were synthesized and used in in vitro priming experiments to generate peptide-specific CD4 T cells. These peptides were 20-mers that overlapped by 15 amino acids and corresponded to amino acids 1-69 of the L773P protein. This region has been demonstrated to be tumor-specific. Following three in vitro stimulations, CD4 T cell lines were identified that produced IFNγ in response to the stimulating peptide but not the control peptide. Some of these T cell lines demonstrated recognition of recombinant L773P and L773PA (tumor-specific region) proteins.

[0808] To perform the experiments, a total of eleven 20-mer peptides (SEQ ID NO: 363, 365 and 387-395) overlapping by 15 amino acids and derived from the N-terminal tumor-specific region of L773P (corresponding to amino acids 1-69 of SEQ ID NO:172) were generated by standard procedures. Dendritic cells were derived from PBMC of a normal donor using GMCSF and IL-4 by standard protocol. Purified CD4 T cells were generated from the same donor as the dendritic cells using MACS beads and negative selection of PBMCs. Dendritic cells were pulsed overnight with the individual 20-mer peptides at a concentration of 10 μg/ml. Pulsed dendritic cells were washed and plated at 1×10⁴/well of a 96-well U-bottom plates, and purified CD4 cells were added at 1×10⁵ well. Cultures were supplemented with 10 ng/ml IL-6 and 5 ng/ml IL-12, and incubated at 37° C. Cultures were re-stimulated as above on a weekly basis using as APC dendritic cells generated and pulsed as above, supplemented with 5 ng/ml IL-7 and 10 μg/ml IL-2. Following 3 in vitro stimulation cycles, cell lines (each corresponding to one well) were tested for cytokine production in response to the stimulating peptide vs. an irrelevant peptide.

[0809] A small number of individual CD4 T cell lines (9/528) demonstrated cytokine release (IFNγ) in response to the stimulating peptide but not to control peptide. The CD4 T cell lines that demonstrated specific activity were restimulated on the appropriate L773P peptide and reassayed using autologous dendritic cells pulsed with 10 μg/ml of the appropriate L773P peptide, an irrelevant control peptide, recombinant L773P protein (amino acids 2-364, made in E. coli), recombinant L773PA (amino acids 2-71, made in E. coli), or an appropriate control protein (L3E, made in E. coli). Three of the nine lines tested (1-3C, 1-6G, and 4-12B) recognized the appropriate L773P peptide as well as recombinant L773P and L773PA. Four of the lines tested (4-8A, 4-8E, 4-12D, and 4-12E) recognized the appropriate L773P peptide only. Two of the lines tested (5-6F and 9-3B) demonstrated non-specific activity.

[0810] These results demonstrate that the peptide sequences MWQPLFFKWLLSCCPGSSQI (amino acids 1-20 of SEQ ID NO: 172; SEQ ID NO:363) and GSSQIAAAASTQPEDDINTQ (amino acids 16-35 of SEQ ID NO: 172; SEQ ID NO: 365) may represent naturally processed epitopes of L773P, which are capable of stimulating human class II MHC-restricted CD4 T cell responses.

[0811] In subsequent studies, the above epitope mapping experiment was repeated using a different donor. Again, some of the resulting T cell lines were found to respond to peptide and recombinant protein. An additional peptide was found to be naturally processed. Specifically, purified CD4 cells were stimulated on a total of eleven 20-mer peptides overlapping by 15 amino acids (SEQ ID NO: 363, 387, 388, 365 and 389-395, respectively). The priming was carried out as described above, except that a peptide concentration of 0.5 ug/mL rather than 10 ug/mL was employed. In the initial screen of the cell lines 9 of the 528 lines released at least a three-fold greater level of IFN-gamma with stimulating peptide vs. control peptide. These 9 lines were restimulated on the appropriate peptide and then tested on dendritic cells pulsed with a titration of appropriate peptide (10 ug/mL, 1 ug/mL and 0.1 ug/mL), and 10 ug/mL of a control peptide. Six of the 9 lines recognized recombinant L773P as well as peptide. The six lines referred to as 1-1E, 1-2E, 1-4H, 1-6A, 1-6G and 2-12B recognized L773PA and the appropriate peptide. These results demonstrate that the peptides of SEQ ID NO: 363 and 387 represent naturally processed epitopes of L773P.

[0812] Using the procedures described above, CD4+ T cell responses were generated from PBMC of normal donors using dendritic cells pulsed with overlapping 20-mer peptides (SEQ ID NO: 396-419) spanning the L523S polypeptide sequence (SEQ ID NO: 176). A number of CD4+ T cells demonstrated reactivity with the priming peptides as well as with L523S recombinant protein, with the dominant reactivity of these lines being within the peptides 4, 7 and 21 (SEQ ID NO: 399, 402 and 416; corresponding to amino acids 30-39, 60-79 and 200-219, respectively, of SEQ ID NO: 176).

[0813] Epitopes within the scope of the invention include epitopes restricted by other class II MHC molecules. In addition, variants of the peptide can be produced wherein one or more amino acids are altered such that there is no effect on the ability of the peptides to bind to MHC molecules, no effect on their ability to elicit T cell responses, and no effect on the ability of the elicited T cells to recognize recombinant protein.

### Example 15

### Surface Expression of L762P and Antibody Epitopes Thereof

[0814] Rabbits were immunized with full-length histidine-tagged L762P protein generated in E. coli. Sera was isolated from rabbits and screened for specific recognition of L762P in ELISA assays. One polyclonal serum, referred to as 2692L, was identified that specifically recognized recombinant L762P protein. The 2692L anti-L762P polyclonal antibodies were purified from the serum by affinity purification using L762P affinity columns. Although L762P is expressed in a subset of primary lung tumor samples, expression appears to be lost in established lung tumor cell lines. Therefore, to characterize surface expression of L762P, a retrovirus construct that expresses L762P was used to transduce primary human fibroblasts as well as 3 lung tumor cell lines (522-23, HTB, and 343T). Transduced lines were selected and expanded to examine L762P surface expression by FACS analysis. For this analysis, non-transduced and transduced cells were harvested using cell dissociation medium, and incubated with 10-50 micrograms/ml of either affinity purified anti L762P or irrelevant antisera. Following a 30 minute incubation on ice, cells were washed and incubated with a secondary, FITC conjugated, anti rabbit IgG antibody as above. Cells were washed, resuspended in buffer with Propidium Iodide (PI) and examined by FACS using an Excalibur fluorescence activated cell sorter. For FACS analysis, PI-positive (i.e. dead/permeabilized cells) were excluded. The polyclonal anti-L762P sera specifically recognized and bound to the surface of L762P-transduced cells but not the non-transduced counterparts. These results demonstrate that L762P is localized to the cell surface of both fibroblasts as well as lung tumor cells.

[0815] To identify the peptide epitopes recognized by 2692L, an epitope mapping approach was pursued. A series of overlapping 19-21 mers (5 amino acid overlap) was synthesized that spanned the C terminal portion of L762P (amino acids 481-894 of SEQ ID NO: 161). In an initial experiment peptides were tested in pools. Specific reactivity with the L762P antiserum was observed with pools A, B, C, and E. To identify the specific peptides recognized by the antiserum, flat bottom 96 well microtiter plates were coated with individual peptides at 10 microgram/ml for 2 hours at 37° C. Wells were then aspirated and blocked with phosphate buffered saline containing 5% (w/v) milk for 2 hours at 37° C., and subsequently washed in PBS containing 0.1% Tween 20 (PBST). Purified rabbit anti-L762P serum 2692L was added at 200 or 20 ng/well to triplicate wells in PBST and incubated overnight at room temperature. This was followed by washing 6 times with PBST and subsequently incubating with HRP-conjugated donkey anti rabbit IgG (H+L)Affinipure F(ab′) fragment at 1:2,000 for 60 minutes. Plates were then washed, and incubated in tetramethyl benzidine substrate. Reactions were stopped by the addition of 1N sulfuric acid and plates were read at 450/570 nm using an ELISA plate reader.

[0816] The resulting data, presented in Table 4 below, demonstrates that the L762P antisera recognized at least 6 distinct peptide epitopes from the 3′ half of L762P.

TABLE 4
ELISA activity (OD 450-570

| Peptide (starting amino | | 200 ng polyclonal | 20 ng polyclonal |
|---|---|---|---|
| acid of L762P) | pool | serum | serum |
| A (481) | A | 1.76 | 1.0 |
| B (495) | A | 0.14 | .06 |
| C (511) | E | 0.47 | 0.18 |
| D (526) | E | 0.11 | 0.09 |
| E (541) | A | 0.11 | 0.04 |
| F (556) | A | 0.04 | 0.02 |
| G (571) | A | 0.06 | 0.02 |
| H (586) | B | 0.1 | 0.03 |
| I (601) | B | 0.25 | 0.06 |
| J (616) | B | 0.1 | 0.03 |
| K (631) | E | 0.1 | 0.08 |
| L (646) | B | 0.28 | 0.12 |
| M (661) | B | 0.14 | 0.03 |
| N (676) | C | 0.12 | 0.1 |
| O (691) | C | 1.1 | 0.23 |
| P (706) | C | 0.1 | 0.03 |
| Q (721) | C | 0.11 | 0.05 |
| R (736) | E | 0.12 | 0.04 |
| S (751) | C | 0.15 | 0.06 |
| U (781) | D | 0.12 | 0.06 |
| V (795) | F | 0.07 | 0.05 |
| X (826) | D | 0.1 | 0.03 |
| Y (841) | D | 0.17 | 0.07 |
| Z (856) | D | 0.16 | 0.08 |
| AA (871) | F | 0.17 | 0.05 |
| BB (874) | F | 0.14 | 0.11 |
| No peptide | | 0.15 | 0.045 |

[0817] Individual peptides were identified from each of the pools, and additionally a weak reactivity was identified with peptide BB from pool F. The relevant peptide epitopes are summarized in the Table 5 below The amino acid sequences for peptides BB, O, L, I, A and C are provided in SEQ ID NO: 376-381, respectively, with the corresponding cDNA sequences being provided in SEQ ID NO: 373, 370, 372, 374, 371 and 375, respectively.

TABLE 5
ELISA activity
(OD 450-570)

| | | Amino | | | | |
|---|---|---|---|---|---|---|
| | Nucleotides | acids of | | | | |
| Peptide | of L762P | L762P | Sequence | pool | 200 ng | 20 ng |
| A | 1441-1500 | 481-500 | SRISSGTGDIFQQHIQLEST | A | 1.76 | 1.0 |
| C | 1531-1590 | 511-530 | KNTVTVDNTVGNDTMFLVTW | E | 0.47 | 0.18 |
| I | 1801-1860 | 601-620 | AVPPATVEAFVERDSLHFPH | B | 0.25 | 0.06 |
| L | 1936-1955 | 646-665 | PETGDPVTLRLLDDGAGADV | B | 0.28 | 0.12 |
| O | 2071-2130 | 691-710 | VNHSPSISTPAHSIPGSHAMIL | C | 1.1 | 0.23 |
| BB | 2620-2679 | 874-893 | LQSAVSNIAQAPLFIPPNSD | F | 0.14 | 0.11 |
| None | — | — | — | — | 0.15 | 0.05 |

### Example 16

### Detection of Antibodies Against Lung Tumor Antigens in Patient Sera

[0818] Antibodies specific for the lung tumor antigens L773PA (SEQ ID NO:361), L514S (SEQ ID NO:155 and 156), L523S (SEQ ID NO:176), L762P (SEQ ID NO:161) and L763P (SEQ ID NO:159) were shown to be present in effusion fluid or sera of lung cancer patients but not in normal donors. More specifically, the presence of antibodies against L773PA, L514S, L523S, L762P and L763P in effusion fluid obtained from lung cancer patients and in sera from normal donors was detected by ELISA using recombinant proteins and HRP-conjugated anti-human Ig. Briefly, each protein (100 ng) was coated in 96-well plate at pH 9.5. In parallel, BSA (bovine serum albumin) was also coated as a control protein. The signals ([S], absorbance measured at 405 nm) against BSA ([N]) were determined. The results of these studies are shown in Table 6, wherein represents [S]/[N]<2; +/−represents [S]/[N]>2; ++represents [S]/[N]>3; and +++represents [S]/[N]>5.

TABLE 6
Detection of Antibodies Against Lung Tumor Antigens

| | L514S | L523S | L762P | L763P | L773PA |
|---|---|---|---|---|---|
| Effusion fluid | | | | | |
| #1 | +++ | ++ | ++ | − | ++ |
| #2 | − | − | +/− | ++ | +/− |
| #3 | − | − | − | − | +/− |
| #4 | +/− | ++ | +/− | − | +/− |
| #5 | +/− | +++ | +/− | +/− | ++ |
| #7 | − | +/− | − | − | +/− |
| #8 | − | +++ | − | − | ++ |
| #10 | − | ++ | +/− | +/− | − |
| #11 | +/− | ++ | ++ | − | ++ |
| #12 | +++ | +/− | − | +/− | +/− |
| #13 | − | +/− | − | − | +/− |
| #14 | − | +++ | +/− | +/− | ++ |
| #15 | +/− | ++ | +/− | − | ++ |
| #17 | − | +/− | − | − | +/− |
| #18 | − | ++ | − | − | − |
| #19 | − | +/− | − | − | +/− |
| #20 | +/− | +/− | +/− | − | +/− |
| Normal sera | | | | | |
| #21 | − | +/− | − | − | − |
| #22 | − | − | − | − | − |
| #23 | − | − | − | − | +/− |
| #24 | − | +/− | − | − | − |
| #25 | +/− | +/− | − | − | +/− |

[0819] Using Western blot analyses, antibodies against L523S were found to be present in 3 out of 4 samples of effusion fluid from lung cancer patients, with no L523S antibodies being detected in the three samples of normal sera tested.

### Example 17

### Expression in E. Coli of a L514S His Tag Fusion Protein

[0820] PCR was performed on the L514S-13160 coding region with the following primers:

[0821] Forward primer PDM-278 5′ cacactagtgtccgcgtggcggcctac 3′ (SEQ ID NO:421) Tm 67° C.

[0822] Reverse primer PDM-280 5′ catgagaattcatcacatgcccttgaaggctccc 3′ (SEQ ID NO:422) TM 66° C.

[0823] The PCR conditions were as follows:

[0824] 10 μl 10× Pfu buffer

[0825] 10 μl 10 mM dNTPs

[0826] 2.0 μl 10 μM each primer

[0827] 83 μl sterile water

[0828] 1.5 μl Pfu DNA polymerase (Stratagene, La Jolla, Calif.)

[0829] 50 ηg DNA

[0830] 96° C. for 2 minutes, 96° C. for 20 seconds, 66° C. for 15 seconds, 72° C. for 1 minute with 40 cycles and then 72° C. for 4 minutes.

[0831] The PCR product was digested with EcoRI restriction enzyme, gel purified and then cloned into pPDM His, a modified pET28 vector with a His tag in frame, which had been digested with Eco72I and EcoRI restriction enzymes. The correct construct was confirmed by DNA sequence analysis and then transformed into BL21 CodonPlus (Stratagene, La Jolla, Calif.) cells for expression.

[0832] The amino acid sequence of expressed recombinant L514S is shown in SEQ ID NO:423, and the DNA coding region sequence is shown in SEQ ID NO:424.

### Example 18

### Expression in E. Coli of a L523S His Tag Fusion Protein

[0833] PCR was performed on the L523S coding region with the following primers:

[0834] Forward primer PDM-414 5′ aacaaactgtatatcggaaacctcagcgagaa 3′ (SEQ ID NO:425) Tm 62° C.

[0835] Reverse primer PDM-415 5′ ccatagaattcattacttccgtcttgactgagg 3′ (SEQ ID NO:426) TM 62° C.

[0836] The PCR conditions were as follows:

[0837] 10 μl 10× Pfu buffer

[0838] 10 μl 10 mM dNTPs

[0839] 2.0 μl 10 mM each primer

[0840] 83 μl sterile water

[0841] 1.5 μl Pfu DNA polymerase (Stratagene, La Jolla, Calif.)

[0842] 50 ηg DNA

[0843] 96° C. for 2 minutes, 96° C. for 20 seconds, 62° C. for 15 seconds, 72° C. for 4 minutes with 40 cycles and then 72° C. for 4 minutes.

[0844] The PCR product was digested with EcoRI restriction enzyme, gel purified and then cloned into pPDM His, a modified pET28 vector with a His tag in frame, which had been digested with Eco72I and EcoRI restriction enzymes. The correct construct was confirmed by DNA sequence analysis and then transformed into BL21 CodonPlus (Stratagene, La Jolla, Calif.) cells for expression.

[0845] The amino acid sequence of expressed recombinant L523S is shown in SEQ ID NO:427, and the DNA coding region sequence is shown in SEQ ID NO:429.

### Example 19

### Expression in E. Coli of a L762PA His Tag Fusion Protein

[0846] PCR was performed on the L762PA coding region (L762PA is missing the signal sequence, the C-terminal transmembrane domain and the cytoplasmic tail) with the following primers:

[0847] Forward primer PDM-278 5′ggagtacagcttcaagacaatggg 3′ (SEQ ID NO:355) Tm 57° C.

[0848] Reverse primer PDM-279 5′ccatggaattcattatttcaatataagataatctc 3′ (SEQ ID NO:429) TM56° C.

[0849] The PCR conditions were as follows:

[0850] 10 μl 10× Pfu buffer

[0851] 1.0 μl 10 mM dNTPs

[0852] 2.0 μl 10M each primer

[0853] 83 μl sterile water

[0854] 1.51 l Pfu DNA polymerase (Stratagene, La Jolla, Calif.)

[0855] 50 ηg DNA

[0856] 96° C. for 2 minutes, 96° C. for 20 seconds, 55° C. for 15 seconds, 72° C. for 5 minutes with 40 cycles and then 72° C. for 4 minutes.

[0857] The PCR product was digested with EcoRI restriction enzyme, gel purified and then cloned into pPDM His, a modified pET28 vector with a His tag in frame, which had been digested with Eco72I and EcoRI restriction enzymes. The correct construct was confirmed by DNA sequence analysis and then transformed into BL21 pLys S (Novagen, Madison, Wis.) cells for expression.

[0858] The amino acid sequence of expressed recombinant L762PA is shown in SEQ ID NO:430, and the DNA coding region sequence is shown in SEQ ID NO:431.

### Example 20

### Expression in E. Coli of a L773P His Tag Fusion Protein

[0859] PCR was performed on the L773P coding region with the following primers:

[0860] Forward primer PDM-299 5′ tggcagcccctcttcttcaagtggc 3′ (SEQ ID NO:359) Tm 63° C.

[0861] Reverse primer PDM-300 5′ cgcctgctcgagtcattaatattcatcagaaaatgg 3′ (SEQ ID NO:432) TM 63° C.

[0862] The PCR conditions were as follows:

[0863] 10 μl 10× Pfu buffer

[0864] 1.0 μl 10 mM dNTPs

[0865] 2.0 μl 10 μM each primer

[0866] 83 μl sterile water

[0867] 1.5 μl Pfu DNA polymerase (Stratagene, La Jolla, Calif.)

[0868] 50 ηg DNA

[0869] 96° C. for 2 minutes, 96° C. for 20 seconds, 63° C. for 15 seconds, 72° C. for 2 minutes 15 seconds with 40 cycles and then 72° C. for 4 minutes.

[0870] The PCR product was digested with EcoRI restriction enzyme, gel purified and then cloned into pPDM His, a modified pET28 vector with a His tag in frame, which had been digested with Eco72I and EcoRI restriction enzymes. The correct construct was confirmed by DNA sequence analysis and then transformed into BL21 pLys S (Novagen, Madison, Wis.) and BL21 CodonPlus (Stratagene, La Jolla, Calif.) cells for expression.

[0871] The amino acid sequence of expressed recombinant L773P is shown in SEQ ID NO:433, and the DNA coding region sequence is shown in SEQ ID NO:434.

### Example 21

### Cloning and Sequencing of a T-Cell Receptor Clone for the Lung Specific Antigen L762P

[0872] T cell receptor (TCR) alpha and beta chains from a CD4 T cell clone specific for the lung specific antigen L762P were cloned and sequence. Basically, total mRNA from 2×10⁶ cells from CTL clone 4H6 was isolated using Trizol reagent and cDNA was synthesized using Ready-to go kits (Pharmacia). To determine Valpha and Vbeta sequences of this clone, a panel of Valpha and Vbeta subtype specific primers was synthesized and used in RT-PCR reactions with cDNA generated from each of the clones. The RT-PCR reactions demonstrated that each of the clones expressed a common Vbeta sequence that corresponded to the Vbeta8 subfamily and a Valpha sequence that corresponded to the Valpha8 subfamily. To clone the full TCR alpha and beta chains from clone 4H6, primers were designed that spanned the initiator and terminator-coding TCR nucleotides. The primers were as follows:

[0873] forward primer for TCR Valpha85′ ggatccgccgccaccatgacatccattcgagctgta 3′ (SEQ ID NO:435; has a BamHI site inserted);

[0874] Kozak reverse primer for TCR Valpha8 (antisense) 5′ gtcgactcagctggaccacagccgcag 3′ (SEQ ID NO:436; has a SalI site inserted plus the TCR alpha constant sequence);

[0875] forward primer for TCR Vbeta8 (sense) 5′ ggatccgccgccaccatggactcctggaccttctgct 3′ (SEQ ID NO:437; has a BamHI site inserted); and

[0876] Kozak reverse primer for TCR Vbeta 5′ gtcgactcagaaatcctttctcttgac 3′ (SEQ ID NO:438; has a SalI site inserted plus the TCR beta constant sequence).

[0877] Standard 35 cycle RT-PCR reactions were established using the cDNA synthesized from the CTL clone and the above primers utilizing the proofreading thermostable polymerase, PWO (Roche). The resultant PCR band, about 850 bp for Valpha and about 950 for Vbeta, was ligated into a PCR blunt vector (Invitrogen) and transformed into E. coli. E. coli transformed with plasmids having full-length alpha and beta chains were identified. Large scale preparations of the corresponding plasmids were generated, and these plasmids were sequenced. The Valpha sequence (SEQ ID NO:439) was shown by nucleotide sequence alignment to be homologous to Valpha8.1, while the Vbeta sequence (SEQ ID NO:440) was shown by nucleotide sequence alignment to be homologous to Vbeta8.2.

### Example 22

### Recombinant Expression of Full Length L762P in Mammalian Cells

[0878] Full length L762P cDNA was subcloned into the mammalian expression vectors VR1012 and pCEP4 (Invitrogen). Both expression vectors had previously been modified to contain a FLAG epitope tag. These constructs were transfected into HEK293 and CHL-1 cells (ATCC) using Lipofectamine 2000 reagent (Gibco). Briefly, both the HEK and CHL-1 cells were plated at a density of 100,000 cells/ml in DMEM (Gibco) containing 10% FBS (Hyclone) and grown overnight. The following day, 4 μl of Lipofectamine 2000 was added to 100 μl of DMEM containing no FBS and incubated for 5 minutes at room temperature. The Lipofectamine/DMEM mixture was then added to 1 μg of L762P Flag/pCEP4 or L762P Flag/VR1012 plasmid DNA resuspended in 100 μl DMEM and incubated for 15 minutes at room temperature. The Lipofectamine/DNA mix was then added to the HEK293 and CHL-1 cells and incubated for 48-72 hours at 37° C. with 7% CO₂. Cells were rinsed with PBS, then collected and pelleted by centrifugation. L672P expression was detected in the transfected HEK293 and CHL-1 cell lysates by Western blot analysis and was detected on the surface of transfected HEK cells by flow cytometry analysis.

[0879] For Western blot analysis, whole cell lysates were generated by incubating the cells in Triton-X100 containing lysis buffer for 30 minutes on ice. Lysates were then cleared by centrifugation at 10,000 rpm for 5 minutes at 4° C. Samples were diluted with SDS-PAGE loading buffer containing beta-mercaptoethanol, then boiled for 10 minutes prior to loading the SDS-PAGE gel. The protein was transferred to nitrocellulose and probed using 1 μg/ml purified anti-L762P rabbit polyclonal sera (lot #690/73) or non-diluted anti-L762P mAb 153.20.1 supernatant. Blots were revealed using either goat anti-rabbit Ig coupled to HRP or goat anti-mouse Ig coupled to HRP followed by incubation in ECL substrate.

[0880] For flow cytometric analysis, cells were washed further with ice cold staining buffer (PBS+1% BSA +Azide). Next, the cells were incubated for 30 minutes on ice with 10 ug/ml of purified anti-L762P polyclonal sera (lot #690/73) or a 1:2 dilution of anti-L762P mAb 153.20.1 supernatant. The cells were washed 3 times with staining buffer and then incubated with a 1:100 dilution of goat anti-rabbit Ig(H+L)-FITC or goat anti-mouse Ig(H+L)-FITC reagent (Southern Biotechnology) for 30 minutes on ice. After 3 washes, the cells were resuspended in staining buffer containing propidium iodide (PI), a vital stain that allows for the exclusion of permeable cells, and analyzed by flow cytometry.

### Example 23

### Generation of Polyclonal Antibodies to Lung Tumor Antigens

[0881] Three lung antigens, L523S (SEQ ID NO:176), L763P (SEQ ID NO:159) and L763 peptide #2684 (SEQ ID NO:441), were expressed and purified for use in antibody generation.

[0882] L523S and L763P were expressed in an E. coli recombinant expression system and grown overnight in LB Broth with the appropriate antibiotics at 37° C. in a shaking incubator. The next morning, 10 ml of the overnight culture was added to 500 ml of 2× YT with the appropriate antibiotics in a 2L-baffled Erlenmeyer flask. When the optical density of the culture reached 0.4-0.6 at 560 nanometers, the cells were induced with IPTG (1 mM). Four hours after induction with IPTG, the cells were harvested by centrifugation.

[0883] The cells were then washed with phosphate buffered saline and centrifuged again. The supernatant was discarded and the cells were either frozen for future use or immediately processed. Twenty milliliters of lysis buffer was added to the cell pellets and vortexed. To break open the E. coli cells, this mixture was then run through a french press at a pressure of 16,000 psi. The cells were then centrifuged again and the supernatant and pellet were checked by SDS-PAGE for the partitioning of the recombinant protein.

[0884] For proteins that localized to the cell pellet, the pellet was resuspended in 10 mM Tris pH 8.0, 1% CHAPS and the inclusion body pellet was washed and centrifuged again. This procedure was repeated twice more. The washed inclusion body pellet was solubilized with either 8M urea or 6M guanidine HCl containing 10 mM Tris pH 8.0 plus 10 mM imidazole. The solubilized protein was added to 5 ml of nickel-chelate resin (Qiagen) and incubated for 45 minutes to 1 hour at room temperature with continuous agitation.

[0885] After incubation, the resin and protein mixture was poured through a disposable column and the flow through was collected. The column was then washed with 10-20 column volumes of the solubilization buffer. The antigen was then eluted from the column using 8M urea, 10 mM Tris pH 8.0 and 300 mM imidazole and collected in 3 ml fractions. A SDS-PAGE gel was run to determine which fractions to pool for further purification.

[0886] As a final purification step, a strong anion exchange resin, in this case Hi-Prep Q (Biorad), was equilibrated with the appropriate buffer and the pooled fractions from above were loaded onto the column. Each antigen was eluted off the column with an increasing salt gradient. Fractions were collected as the column was run and another SDS-PAGE gel was run to determine which fractions from the column to pool.

[0887] The pooled fractions were dialyzed against 10 mM Tris pH 8.0. The release criteria were purity as determined by SDS-PAGE or HPLC, concentration as determined by Lowry assay or Amino Acid Analysis, identity as determined by amino terminal protein sequence, and endotoxin level was determined by the Limulus (LAL) assay. The proteins were then put in vials after filtration through a 0.22-micron filter and the antigens were frozen until needed for immunization.

[0888] The L763 peptide #2684 was synthesized and conjugated to KLH and froze until needed for immunization.

[0889] The polyclonal antisera were generated using 400 micrograms of each lung antigen combined with 100 micrograms of muramyldipeptide (MDP). An equal volume of Incomplete Freund's Adjuvant (IFA) was added and then mixed and injected subcutaneously (S.C.) into a rabbit. After four weeks, the rabbit was S.C. boosted with 200 micrograms of antigen mixed with an equal volume of IFA. Thereafter the rabbit was I.V. boosted with 100 micrograms of antigen. The animal was bled seven days following each boost. The blood was then incubated at 4° C. for 12-24 hours followed by centrifugation to generate the sera.

[0890] The polyclonal antisera were characterized using 96 well plates coated with antigen and incubated with 50 microliters (typically 1 microgram/microliter) of the polyclonal antisera at 4° C. for 20 hours. Basically, 250 microliters of BSA blocking buffer was added to the wells and incubated at room temperature for 2 hours. Plates were washed 6 times with PBS/0.1% Tween. The rabbit sera were diluted in PBS/0.1% Tween/0.1% BSA. 50 microliters of diluted sera was added to each well and incubated at room temperature for 30 minutes. The plates were washed as described above, and then 50 microliters of goat anti-rabbit horseradish peroxidase (HRP) at a 1:10000 dilution was added and incubated at room temperature for 30 minutes.

[0891] The plates were washed as described above, and 100 microliters of TMB Microwell Peroxidase Substrate was added to each well. Following a 15-minute incubation in the dark at room temperature, the colorimetric reaction was stopped with 100 microliters of 1N H₂SO₄ and read immediately at 450 nm. All the polyclonal antibodies showed immunoreactivity to the appropriate antigen Tables 7-9 show the, antibody reactivity of rabbit antisera in serial dilution to the three lung antigens, L523S, L763P and L763 peptide #2684. The first column shows the antibody dilutions. The columns “Pre-immune sera” indicate ELISA data for two experiments using pre-immune sera. These results are averaged in the fourth column. The columns “anti-L523S, L763P or #2684” indicate ELISA data for two experiments using sera from rabbits immunized as described in this Example, using the respective antigen, referred to as either L523S, L763P or #2684 in the tables.

TABLE 7

| | Pre- | Pre- | | Anti- | Anti- | |
|---|---|---|---|---|---|---|
| Antibody | immune | immune | | L523S | L523S | |
| dilution | sera (1) | sera (2) | Average | (1) | (2) | Average |
| 1:1000 | 0.14 | 0.14 | 0.14 | 2.36 | 2.37 | 2.37 |
| 1:2000 | 0.12 | 0.10 | 0.11 | 2.29 | 2.23 | 2.26 |
| 1:4000 | 0.10 | 0.09 | 0.10 | 2.11 | 2.17 | 2.14 |
| 1:8000 | 0.09 | 0.09 | 0.09 | 1.98 | 2.00 | 1.99 |
| 1:16000 | 0.09 | 0.09 | 0.09 | 1.73 | 1.76 | 1.75 |
| 1:32000 | 0.09 | 0.09 | 0.09 | 1.35 | 1.40 | 1.37 |
| 1:64000 | 0.09 | 0.11 | 0.10 | 0.94 | 0.98 | 0.96 |
| 1:128000 | 0.09 | 0.08 | 0.08 | 0.61 | 0.61 | 0.61 |
| 1:256000 | 0.08 | 0.08 | 0.08 | 0.38 | 0.38 | 0.38 |
| 1:512000 | 0.09 | 0.08 | 0.08 | 0.24 | 0.25 | 0.25 |
| 1:1024000 | 0.08 | 0.08 | 0.08 | 0.17 | 0.17 | 0.17 |
| 1:2048000 | 0.08 | 0.08 | 0.08 | 0.14 | 0.13 | 0.13 |

[0892] TABLE 8

| | Pre- | Pre- | | Anti- | Anti- | |
|---|---|---|---|---|---|---|
| Antibody | immune | immune | | L763P | L763P | |
| dilution | sera (1) | sera (2) | Average | (1) | (2) | Average |
| 1:1000 | 0.09 | 0.11 | 0.10 | 1.97 | 1.90 | 1.93 |
| 1:2000 | 0.07 | 0.07 | 0.07 | 1.86 | 1.84 | 1.85 |
| 1:4000 | 0.06 | 0.06 | 0.06 | 1.82 | 1.81 | 1.81 |
| 1:8000 | 0.06 | 0.06 | 0.06 | 1.83 | 1.81 | 1.82 |
| 1:16000 | 0.06 | 0.05 | 0.06 | 1.79 | 1.74 | 1.76 |
| 1:32000 | 0.06 | 0.06 | 0.06 | 1.56 | 1.51 | 1.53 |
| 1:64000 | 0.06 | 0.05 | 0.05 | 1.35 | 1.34 | 1.35 |
| 1:128000 | 0.05 | 0.05 | 0.05 | 1.01 | 0.98 | 0.99 |
| 1:256000 | 0.06 | 0.05 | 0.05 | 0.69 | 0.70 | 0.70 |
| 1:512000 | 0.06 | 0.05 | 0.05 | 0.47 | 0.44 | 0.46 |
| 1:1024000 | 0.06 | 0.05 | 0.06 | 0.27 | 0.27 | 0.27 |
| 1:2048000 | 0.05 | 0.05 | 0.05 | 0.16 | 0.15 | 0.16 |

[0893] TABLE 9

| | Pre- | Pre- | | Anti- | Anti- | |
|---|---|---|---|---|---|---|
| Antibody | immune | immune | | #2684 | #2684 | |
| dilution | sera (1) | sera (2) | Average | (1) | (2) | Average |
| 1:1000 | 0.07 | 0.07 | 0.07 | 2.10 | 2.00 | 2.05 |
| 1:2000 | 0.07 | 0.06 | 0.06 | 1.95 | 1.96 | 1.95 |
| 1:4000 | 0.06 | 0.06 | 0.06 | 1.77 | 1.82 | 1.79 |
| 1:8000 | 0.06 | 0.06 | 0.06 | 1.79 | 1.81 | 1.80 |
| 1:16000 | 0.06 | 0.06 | 0.06 | 1.54 | 1.50 | 1.52 |
| 1:32000 | 0.06 | 0.06 | 0.06 | 1.27 | 1.20 | 1.24 |
| 1:64000 | 0.06 | 0.06 | 0.06 | 0.85 | 0.82 | 0.83 |
| 0 | 0.06 | 0.06 | 0.06 | 0.06 | 0.06 | 0.06 |

[0894] Tables 10-12 show the affinity purification of the respective antibodies to the three lung antigens, L523S, L763P and L763 peptide #2684.

TABLE 10

| | Affinity | Affinity | | Affinity | Affinity | |
|---|---|---|---|---|---|---|
| Antibody | pure | pure | | pure | pure | |
| conc. | (salt | (salt | | (acid | (acid | |
| (μg/ml) | peak) | peak) | Average | peak) | peak) | Average |
| 1.0 | 2.38 | 2.35 | 2.36 | 2.25 | 2.31 | 2.28 |
| 0.5 | 2.24 | 2.22 | 2.23 | 2.19 | 2.18 | 2.18 |
| 0.25 | 2.05 | 2.09 | 2.07 | 2.01 | 2.03 | 2.02 |
| 0.13 | 1.70 | 1.81 | 1.75 | 1.74 | 1.74 | 1.74 |
| 0.063 | 1.44 | 1.44 | 1.44 | 1.43 | 1.38 | 1.40 |
| 0.031 | 1.05 | 1.05 | 1.05 | 0.99 | 0.99 | 0.99 |
| 0.016 | 0.68 | 0.67 | 0.68 | 0.65 | 0.64 | 0.64 |
| 0.0078 | 0.43 | 0.42 | 0.42 | 0.39 | 0.39 | 0.39 |
| 0.0039 | 0.27 | 0.26 | 0.27 | 0.24 | 0.26 | 0.25 |
| 0.0020 | 0.18 | 0.20 | 0.19 | 0.19 | 0.18 | 0.19 |
| 0.0010 | 0.13 | 0.14 | 0.13 | 0.13 | 0.14 | 0.13 |
| 0.00 | 0.11 | 0.12 | 0.11 | 0.10 | 0.12 | 0.11 |

[0895] TABLE 11

| Antibody | Affinity | Affinity | |
|---|---|---|---|
| dilution | pure | pure | Average |
| 1:1000 | 1.64 | 1.77 | 1.70 |
| 1:2000 | 1.59 | 1.76 | 1.68 |
| 1:4000 | 1.48 | 1.62 | 1.55 |
| 1:8000 | 1.35 | 1.43 | 1.39 |
| 1:16000 | 1.09 | 1.19 | 1.14 |
| 1:32000 | 0.81 | 0.89 | 0.85 |
| 1:64000 | 0.55 | 0.58 | 0.56 |
| 1:128000 | 0.31 | 0.35 | 0.33 |
| 1:256000 | 0.18 | 0.20 | 0.19 |
| 1:512000 | 0.11 | 0.12 | 0.11 |
| 1:1024000 | 0.07 | 0.07 | 0.07 |
| 1:2048000 | 0.06 | 0.06 | 0.06 |

[0896] TABLE 12

| Antibody | | | |
|---|---|---|---|
| conc. | Affinity | Affinity | |
| (μg/ml) | pure | pure | Average |
| 1.0 | 2.00 | 2.02 | 2.01 |
| 0.5 | 2.01 | 1.93 | 1.97 |
| 0.25 | 1.84 | 1.83 | 1.84 |
| 0.13 | 1.80 | 1.83 | 1.81 |
| 0.06 | 1.39 | 1.60 | 1.50 |
| 0.03 | 1.33 | 1.35 | 1.34 |
| 0.02 | 0.94 | 0.93 | 0.94 |
| 0.00 | 0.06 | 0.06 | 0.06 |

### Example 24

### Full-Length cDNA Sequence Encoding L529S

[0897] The isolation of a partial sequence (SEQ ID NO:106) for lung antigen L529S was previously provided in Example 2. This partial sequence was used as a query to identify potential full length cDNA and protein sequences by searching against publicly available databases. The predicted full-length cDNA sequence for the isolated cloned sequence of SEQ ID NO: 106 is provided in SEQ ID NO:442. The deduced amino acid sequence of the antigen encoded by SEQ ID NO:442 is provided in SEQ ID NO:443. It was previously disclosed in Example 2 that L529S shows similarity to connexin 26, a gap junction protein.

### Example 25

### Expression in Megaterium of a Histidine Tag-Free L523S Fusion Protein

[0898] PCR was performed on the L523S coding region with the following primers:

[0899] Forward primer PDM-734 5′ caatcaggcatgcacaacaaactgtatatcggaaac 3′ (SEQ ID NO:444) Tm 63° C.

[0900] Reverse primer PDM-735 5′ cgtcaagatcttcattacttccgtcttgac 3′ (SEQ ID NO:445) TM 60° C.

[0901] The PCR conditions were as follows:

[0902] 10 μl 10× Pfu buffer

[0903] 1.0 μl 10 mM dNTPs

[0904] 2.0 μl 10 mM each primer

[0905] 83 μl sterile water

[0906] 1.5 μl Pfu DNA polymerase (Stratagene, La Jolla, Calif.)

[0907] 50 ηg DNA

[0908] 96° C. for 2 minutes, 96° C. for 20 seconds, 62° C. for 15 seconds, 72° C. for 4 minute with 40 cycles and then 72° C. for 4 minutes.

[0909] The PCR product was digested with SphI and BglII restriction enzymes, gel purified and then cloned into pMEG-3, which had been digested with SphI and BglII restriction enzymes. The correct construct was confirmed by DNA sequence analysis and then transformed into Megaterium cells for expression.

[0910] The amino acid sequence of expressed recombinant L523S is shown in SEQ ID NO:446, and the DNA coding region sequence is shown in SEQ ID NO:447.

### Example 26

### Expression in E. Coli of a Histidine Tag-Free L523 S Fusion Protein

[0911] PCR was performed on the L523S coding region with the following primers:

[0912] Forward primer PDM-733 5′ cgtactagcatatgaacaaactgtatatcggaaac 3′ (SEQ ID NO:448) Tm 64° C.

[0913] Reverse primer PDM-415 5′ ccatagaattcattacttccgtcttgactgagg 3′ (SEQ ID NO:426) TM 62° C.

[0914] The PCR conditions were as follows:

[0915] 10 μl 10× Pfu buffer

[0916] 1.0 μl 10 mM dNTPs

[0917] 2.0 μl 10 μM each primer

[0918] 83 μl sterile water

[0919] 1.5 μl Pfu DNA polymerase (Stratagene, La Jolla, Calif.)

[0920] 50 ηg DNA

[0921] 96° C. for 2 minutes, 96° C. for 20 seconds, 62° C. for 15 seconds, 72° C. for 4 minute with 40 cycles and then 72° C. for 4 minutes.

[0922] The PCR product was digested with NdeI and EcoRI restriction enzymes, gel purified and then cloned into pPDM, a modified pET28 vector, which had been digested with NdeI and EcoRI restriction enzymes. The correct construct was confirmed by DNA sequence analysis and then transformed into BLR pLys S and HMS 174 pLys S cells for expression.

[0923] The amino acid sequence of expressed recombinant L523S is shown in SEQ ID NO:449, and the DNA coding region sequence is shown in SEQ ID NO:450.

### Example 27

### Epitope-Analysis of L514S and L523S-Specific Antibodies

[0924] Peptides of candidate antigens can be used for the evaluation of antibody responses in both preclinical and clinical studies. These data allow one to further confirm the antibody response against a certain candidate antigen. Protein-based ELISA with and without competitive peptides and peptide-based ELISA can be used to evaluate these antibody responses. Peptide ELISA is especially useful since it can further exclude the false positive of the antibody titer observed in protein-based ELISA as well as to provide the simplest assay system to test antibody responses to candidate antigens. In this example, data was obtained using both L514S- and L523S-peptides that show that individual cancer patients produce L514S- and L523S-specific antibodies. The L514S-specific antibodies recognize primarily the following epitope of L514S:

| | |
|---|---|
| aa86-110: | |
| LGKEVRDAKITPEAFEKLGFPAAKE. | (SED ID NO:451) |

[0925] This epitope is the common epitope in humans. A rabbit antibody specific for L514S recognizes two addition epitopes of L514S:

| | |
|---|---|
| (1) aa21-45: | |
| KASDGDYYTLAVPMGDVPMDGISVA | (SEQ ID NO:452) |
| (2) aa121-135: | |
| PDRDVNLTHQLNPKVK | (SED ID NO:453) |

[0926] It was further found that the SEQ ID NO:452 is common to both L514S isoforms, L514S-13160 and L514S-13166, whereas the other epitopes, SEQ ID NO:451 and SEQ ID NO:453, are probably specific to the isoform, L514S-13160.

[0927] The L523S-specific antibodies recognize primarily the following epitope of L523S:

| | |
|---|---|
| aa440-460: KIAPAEAPDAKVRMVIITGP. | (SEQ ID NO:454) |

[0928] This epitope is the common epitope in humans. A rabbit antibody specific for L523S recognizes two other epitopes:

| | |
|---|---|
| (1) aa156-175 | |
| PDGAAQQNNNPLQQPRG | (SEQ ID NO:455) |
| (2) aa326-345: | |
| RTITVKGNVETCAKAEEEIM | (SED ID NO:456) |

[0929] In further studies, it was determined by peptide based ELISAs that eight additional epitopes of L523S were recognized by L523S-specific antibodies:

| | |
|---|---|
| (1) aa40-59 | |
| AFVDCPDESWALKAIEALS | (SEQ ID NO:457) |
| (2) aa80-99: | |
| IRKLQIRNIPPHLQWEVLDS | (SED ID NO:458) |
| (3) aa160-179: | |
| AQQNPLQQPRGRRGLGQRGS | (SEQ ID NO:459) |
| (4) aa180-199: | |
| DVHRKENAGAAEKSITILST | (SED ID NO:460) |
| (5) aa320-339: | |
| LYNPERTITVKGNVETCAKA | (SEQ ID NO:461) |
| (6) aa340-359: | |
| EEEIMKKIRESYENDIASMN | (SED ID NO:462) |
| (7) aa370-389: | |
| LNALGLFPPTSGMPPPTSGP | (SEQ ID NO:463) |
| (8) aa380-399: | |
| KIAPAEAPDAKVRMVIITGP | (SED ID NO:464) |

[0930] Out of these, six epitopes are common in both lung plural effusion fluid samples and in sera of lung patients. Of these six, SEQ ID NO:459 and SEQ ID NO:463 have no homology to other L523S-family proteins such as IGF-II mRNA-binding proteins 1 and 2. Accordingly, this indicates that these two peptides can be used as an assay system to determine the antibody response to L523S.

### Example 28

### Generation of L523S-Specific CTL Lines Using in Vitro Whole-Gene Priming

[0931] To determine if L523S is capable of generating a CD8+ T cell immune response, CTLs were generated using in vitro whole-gene priming methodologies with tumor antigen-vaccinia infected DC (Yee et al, The Journal of Immunology, 157(9):4079-86, 1996), human CTL lines were derived that specifically recognize autologous fibroblasts transduced with the L523S tumor antigen, as determined by interferon-gamma ELISPOT analysis. Specifically, dendritic cells (DC) were differentiated from Percoll-purified monocytes derived from PBMC of normal human donors by plastic adherence and growing for five days in RPMI medium containing 10% human serum, 50 ng/ml human GM-CSF and 30 ng/ml human IL-4. Following the five days of culture, the DC were infected overnight with a recombinant adenovirus that expresses L523S at a multiplicity of infection (M.O.I) of 33, 66 and 100, and matured overnight by the addition of 2 μg/ml CD40 ligand. The virus was then inactivated by gamma irradiation. In order to generate a CTL line, autologous PBMC were isolated and CD8+ T cells were enriched for by the negative selection using magnetic beads conjugated to CD4+, CD14+, CD16+, CD19+, CD34+ and CD56+ cells. CD8+ T cells specific for L523S were established in round bottom 96-well plates using 10,000 L523S expressing DCs and 100,000 CD8+ T cells per well in RPMI supplemented with 10% human serum, 10 ng/ml of IL-6 and 5 ng/ml of IL-12. The cultures were restimulated every 7-10 days using autologous primary fibroblasts retrovirally transduced with L523S, and the costimulatory molecule CD80 in the presence of IL-2. The cells were also stimulated with IFN-gamma to upregulate MHC Class I. The media was supplemented with 10U/ml of IL-2 at the time of stimulation as well as on days 2 and 5 following stimulation. Following three stimulation cycles, ten L523S specific CD8+ T cell lines were identified using interferon-gamma ELISPOT analysis that specifically produce interferon-gamma when stimulated with the L523S tumor antigen-transduced autologous fibroblasts, but not with a control antigen.

[0932] One line, 6B1, was cloned using anti-CD3 and feeder cells. The clones were tested for specificity on L523S-transduced fibroblasts. In addition, using a panel of HLA-mismatched lines transduced with a vector expressing L523S and measuring interferon-gamma production by this CTL line in an ELISPOT assay, it was determined that this clone 6B1.4B8 is restricted by HLA-A0201.

[0933] Also using transfected Cos cells, it was shown that clone 6B1.4B8 recognizes Cos cells transfected with pcDNA3 HLA A0201/L523S in an HLA-restricted and antigen specific manner.

[0934] An epitope mapping study demonstrated the clone 6B1.4B8 recognizes HLA-A201 LCL loaded with peptide pool 3 (a polypeptide corresponding to amino acid positions 33-59 of L523S.

[0935] A peptide pool breakdown study demonstrated that clone 6B1.4B8 recognizes autologous B-LCL loaded with 15-mer peptides from amino acid positions 37-55 of L523S, TGYAFVCPDESWALKAIE (SEQ ID NO:465). A further peptide breakdown study demonstrated that clone 6B 1.4B8 recognizes T2 cells loaded with the same 15-mer peptides.

[0936] A peptide recognition study demonstrated that clone 6B1.4B8 prefers T2 cells loaded with the peptide FVDCPESWAL (SEQ ID NO:466) which is corresponds to the amino acid sequence at positions 41-51 of L523S and is encoded by the DNA sequence of SEQ ID NO:467.

### Example 29

### L523S Expression in Other Human Cancers

[0937] It was previously disclosed in Example 2 that L523S is expressed in lung cancers including squamous, adenocarcinoma and small cell carcinoma. To further evaluate the expression profile of this antigen an electronic express profiling was performed. This was done by searching a L523S-specific sequence against a public EST database. Results of this profiling indicate that L523S may also be present in colon adenocarcinomas, prostate adenocarcinomas, CML, AML, Burkitt's Lymphoma, brain tumors, retinoblastomas, ovarian tumors, teratocarcinomas, uterus myosarcomas, germ cell tumors as well as pancreatic and cervical tumor cell lines.

### Example 30

### Immunohistochemistry Analysis of L523S

[0938] In order to determine which tissues express the lung tumor antigen L523S, immunohistochemistry (1HC) analysis was performed on a diverse range of tissue types. Polyclonal antibodies specific for L523S (SEQ ID NO:176) were generated as described in Example 23. IHC was performed essentially as described in Example 6. Briefly, tissue samples were fixed in formalin solution for 12-24 hours and embedded in paraffin before being sliced into 8 micron sections. Steam heat induced epitope retrieval (SHIER) in 0.1 sodium citrate buffer (pH 6.0) was used for optimal staining conditions. Sections were incubated with 10% serum in PBS for 5 minutes. The primary L523S antibody was added to each section for 25 minutes followed by a 25 minute incubation with anti-rabbit biotinylated antibody. Endogenous peroxidase activity was blocked by three 1.5 minute incubations with hydrogen peroxidase. The avidin biotin complex/horse radish peroxidase (ABC/HRP) system was used along with DAB chromogen to visualize antigen expression. Slides were counterstained with hematoxylin to visualize the cell nuclei.

[0939] IHC analysis of L523S expression revealed that of the lung cancer tissues tested over 90% of tissue samples demonstrated high over-expression of the lung tumor antigen (10/11 adenocaricomas and 8/9 squamous). Of the normal tissues tested, all were negative for expression of L523S, with the exception of weak staining in normal bronchus, testis, liver, and trachea.

### Example 31

### Generation and Characterization of L762 Human Monoclonal Antibodies

[0940] Cell supernatants from hybridoma fusions from the Xenomouse strain of transgenic mice were screened for ability to bind to L762P. All results are shown in Table 13. The primary screen was to test monoclonal supernatants for reactivity to L762P by ELISA analysis using recombinant bacterial expressed protein. We next tested the human supernatants for reactivity to surface expressed L762P by whole cell ELISA using fluorimetry analysis. Specific reactivity of the humab supernatants was confirmed by performing FACS analysis on cells transfected with either an irrelevant plasmid or a plasmid expressing L762P. FI/CFI is the relative fold increase in fluorescence intensity (FI) of the anti-L762P humab primary antibody to irrelevant human primary antibody. FI/CFI/A20 is the relative fold increase in fluorescence intensity (FI) of the anti-L762P humab primary antibody to irrelevant human primary antibody over the FI of the anti-L762P mouse monoclonal antibody 153A20.1. FI/CFI/R690 is the relative fold increase in fluorescence intensity (FI) of the anti-L762P humab primary antibody to irrelevant human primary antibody over the FI of the anti-L762P rabbit polyclonal antibody. FACS VRL762 is the percentage of cells transfected with plasmid expressing L762P that were positive following staining with indicated monoclonal antibody. FACS VR(−) is the percentage of cells transfected with irrelevant plasmid that were positive following staining with indicated monoclonal antibody. ELISA is the O.D. values of the indicated monoclonal antibody to recombinant L762P protein. The shaded rows in Table 13 indicate those antibodies that will be further cloned and characterized.

TABLE 13
Human Monoclonal Antibodies Against L762P

| | | FI/CFI/ | FI/CFI/ | | FACS | | L762/ |
|---|---|---|---|---|---|---|---|
| L762PHumAb | FI/CFI | A20 | R690 | FACSVRL762 | VR (−) | ELISA | VR1013 |
| R-690 | 4.59 | | 1.00 | | | | |
| M-A20 | 2.88 | 1.00 | | | | | |
| 1.176 | 0.51 | 0.18 | 0.11 | | | 0.38 | |
| 1.178 | 1.42 | 0.49 | 0.31 | | | 0.35 | |
| 1.179 | 0.47 | 0.16 | 0.10 | | | 0.07 | |
| 1.180 | 1.50 | 0.52 | 0.33 | | | 0.26 | |
| 1.182 | 1.45 | 0.50 | 0.32 | | | 0.26 | |
| 1.183 | 0.75 | 0.26 | 0.16 | | | 0.24 | |
| 1.185 | 0.89 | 0.31 | 0.19 | | | 0.46 | |
| 1.186 | 3.45 | 1.20 | 0.75 | 32.68 | 7.14 | 1.22 | 1.93 |
| 1.187 | 0.36 | 0.13 | 0.08 | | | 0.06 | |
| 1.188 | 0.26 | 0.09 | 0.06 | | | 0.23 | |
| 1.189 | 0.50 | 0.17 | 0.11 | | | 0.44 | |
| 1.190 | 0.53 | 0.18 | 0.12 | | | 0.42 | |
| 1.191 | 3.12 | 1.08 | 0.68 | 41.44 | 17.90 | 0.86 | 1.29 |
| 1.192 | 1.91 | 0.66 | 0.42 | | | 0.12 | |
| 1.193 | 2.87 | 1.00 | 0.63 | 17.82 | 6.43 | 0.13 | 1.06 |
| 1.194 | 1.55 | 0.54 | 0.34 | | | 0.28 | |
| 1.195 | 0.14 | 0.05 | 0.03 | | | 0.37 | |
| 1.196 | 1.97 | 0.68 | 0.43 | | | 0.89 | 1.64 |
| 1.197 | 0.43 | 0.15 | 0.09 | | | 0.08 | |
| 1.198 | 0.54 | 0.19 | 0.12 | | | 0.33 | |
| 1.199 | 0.70 | 0.24 | 0.15 | | | 0.40 | |
| 1.200 | 2.00 | 0.69 | 0.44 | | | 0.38 | 1.56 |
| 1.201 | 1.62 | 0.56 | 0.35 | | | 0.29 | |
| 1.202 | 0.86 | 0.30 | 0.19 | | | 0.36 | |
| 1.203 | 1.56 | 0.27 | 0.18 | | | 0.14 | |
| 1.204 | 3.32 | 0.58 | 0.38 | 24.83 | 6.60 | 0.17 | 1.91 |
| 1.205 | 2.13 | 0.37 | 0.25 | | | 0.09 | |
| 1.206 | 0.45 | 0.08 | 0.05 | | | 0.23 | |
| 1.207 | 0.60 | 0.10 | 0.07 | | | 0.39 | |
| 1.208 | 0.12 | 0.02 | 0.01 | | | 0.36 | |
| 1.209 | 15.52 | 2.71 | 1.80 | 27.54 | 9.54 | 0.16 | 0.77 |
| 1.210 | 0.92 | 0.16 | 0.11 | | | 0.16 | |
| 1.211 | 2.83 | 0.49 | 0.33 | | | 0.42 | |
| 1.212 | 3.40 | 0.59 | 0.39 | 21.68 | 11.36 | 0.14 | 2.47 |
| 1.213 | 2.32 | 0.40 | 0.27 | | | 0.38 | |
| 1.214 | 0.80 | 0.14 | 0.09 | | | 0.34 | |
| 1.215 | 3.96 | 0.69 | 0.46 | 38.87 | 13.17 | 0.33 | 1.80 |
| 1.216 | 1.26 | 0.22 | 0.15 | | | 0.20 | |
| 1.217 | 1.99 | 0.35 | 0.23 | | | 0.26 | |
| 1.218 | 2.29 | 0.40 | 0.27 | | | 0.10 | |
| 1.219 | 0.15 | 0.03 | 0.02 | | | 0.06 | |
| 1.220 | 0.82 | 0.14 | 0.09 | | | 0.21 | |
| 1.221 | 2.29 | 0.40 | 0.27 | | | 0.12 | |
| 1.222 | 0.57 | 0.10 | 0.07 | | | 0.45 | |
| 1.223 | 0.11 | 0.02 | 0.01 | | | 0.11 | |
| 1.224 | 2.08 | 0.36 | 0.24 | | | 0.25 | |
| 1.225 | 0.95 | 0.17 | 0.11 | | | 0.22 | |
| 1.226 | −0.32 | −0.06 | −0.04 | | | 0.06 | |
| R-690 | 8.62 | | 1.00 | 72.34 | 39.83 | | |
| M-A20 | 5.73 | 1.00 | | 50.23 | 6.34 | | |
| M-A12 | | | 67.43 | 25.15 | | | |
| M-Irr | | | 7.74 | 7.35 | | | |
| R-Irr | | | 30.09 | 24.80 | | | |
| H-lrr | | | 25.52 | 39.14 | | | |
| R-690 | 3.20 | | 1.00 | | | | |
| M-A20 | 2.33 | 1.00 | | | | | |
| 1.250 | 0.15 | 0.06 | 0.05 | | | 0.28 | |
| 1.228 | 0.38 | 0.16 | 0.12 | | | 0.08 | |
| 1.229 | 0.39 | 0.17 | 0.12 | | | 0.44 | |
| 1.230 | 1.78 | 0.76 | 0.56 | | | 0.13 | 1.35 |
| 1.231 | 0.42 | 0.18 | 0.13 | | | 0.47 | |
| 1.232 | 0.34 | 0.15 | 0.11 | | | 0.25 | |
| 1.233 | 7.07 | 3.04 | 2.21 | 68.84 | 38.60 | 0.43 | 0.75 |
| 1.234 | 2.54 | 1.09 | 0.79 | 33.96 | 10.94 | 0.73 | 1.68 |
| 1.235 | 1.53 | 0.65 | 0.48 | | | 0.19 | 1.45 |
| 1.236 | 0.17 | 0.07 | 0.05 | | | 0.44 | |
| 1.237 | 0.35 | 0.15 | 0.11 | | | 0.06 | |
| 1.238 | 0.38 | 0.16 | 0.12 | | | 0.06 | |
| 1.239 | 0.40 | 0.17 | 0.13 | | | 0.06 | |
| 1.240 | 2.05 | 0.88 | 0.64 | 28.70 | 7.44 | 0.33 | 1.70 |
| 1.241 | 0.41 | 0.18 | 0.13 | | | 0.41 | |
| 1.242 | 0.52 | 0.23 | 0.16 | | | 0.05 | |
| 1.243 | 2.34 | 1.00 | 0.73 | 30.94 | 28.13 | 0.16 | 1.33 |
| 1.244 | 0.94 | 0.40 | 0.29 | | | 0.23 | |
| 1.245 | 0.37 | 0.16 | 0.11 | | | 0.31 | |
| 1.246 | 2.10 | 0.90 | 0.66 | 13.97 | 28.92 | 0.52 | 1.21 |
| 1.247 | 0.33 | 0.14 | 0.10 | | | 0.37 | |
| 1.248 | 1.80 | 0.77 | 0.56 | | | 0.76 | |
| 1.249 | 2.77 | 1.19 | 0.86 | 28.76 | 12.37 | 1.15 | 2.38 |
| 1.251 | 0.22 | 0.09 | 0.07 | | | 0.47 | |
| 1.252 | 1.16 | 0.27 | 0.17 | | | 0.37 | |
| 1.253 | 0.07 | 0.02 | 0.01 | | | 0.43 | |
| 1.254 | 2.05 | 0.48 | 0.30 | | | 0.14 | |
| 1.255 | 0.09 | 0.02 | 0.01 | | | 0.08 | |
| 1.256 | 1.17 | 0.27 | 0.17 | | | 0.13 | |
| 1.257 | 0.42 | 0.10 | 0.06 | | | 0.06 | |
| 1.258 | 0.48 | 0.11 | 0.07 | | | 0.40 | |
| 1.259 | 4.82 | 1.13 | 0.69 | 40.24 | 11.92 | 0.38 | 1.78 |
| 1.260 | 1.80 | 0.42 | 0.26 | | | 0.38 | |
| 2.1 | 2.70 | 0.63 | 0.39 | | | 0.14 | 1.35 |
| 2.3 | 0.06 | 0.01 | 0.01 | | | 0.57 | |
| 2.4 | 3.08 | 0.72 | 0.44 | 31.28 | 11.43 | 0.73 | 1.95 |
| 2.5 | 0.70 | 0.16 | 0.10 | | | 0.45 | |
| 2.6 | 1.26 | 0.29 | 0.18 | | | 0.22 | |
| 2.8 | 0.59 | 0.14 | 0.09 | | | 0.31 | |
| 2.9 | 7.48 | 1.75 | 1.08 | 45.72 | 17.57 | 0.95 | 1.53 |
| 2.10 | 0.35 | 0.08 | 0.05 | | | 0.42 | |
| 2.11 | 2.71 | 0.63 | 0.39 | | | 0.60 | 1.58 |
| 2.12 | 6.04 | 1.41 | 0.87 | 52.50 | 19.59 | | 1.40 |
| 2.13 | 5.50 | 1.28 | 0.79 | 39.78 | 15.24 | | 1.39 |
| 2.14 | 0.68 | 0.16 | 0.10 | | | | |
| 2.15 | 6.51 | 1.52 | 0.94 | 49.90 | 15.36 | | 1.72 |
| 2.16 | 4.58 | 1.07 | 0.66 | 28.62 | 13.02 | | 1.51 |
| 2.17 | 8.10 | 1.89 | 1.17 | 48.76 | 18.24 | | 3.06 |
| R-690 | 6.94 | | 1.00 | | | | |
| M-A20 | 4.28 | 1.00 | | 56.40 | 5.00 | | |
| R-690 | 4.34 | 1.65 | 1.00 | | | | |
| M-A20 | 2.63 | 1.00 | 0.61 | | | | |
| 2.18 | 2.29 | 0.87 | 0.53 | | | 1.27 | 1.95 |
| 2.20 | 1.85 | 0.70 | 0.43 | | | 0.52 | 2.75 |
| 2.21 | 0.09 | 0.03 | 0.02 | | | 0.40 | |
| 2.22 | 3.26 | 1.24 | 0.75 | 29.4 | 6.2 | 1.45 | 1.8 |
| 2.23 | 0.31 | 0.12 | 0.07 | | | 0.12 | |
| 2.24 | 1.21 | 0.46 | 0.28 | | | 0.65 | |
| 2.25 | 3.47 | 1.32 | 0.80 | 32.5 | 7.1 | 1.35 | 1.46 |
| 2.26 | 4.42 | 1.68 | 1.02 | 35.9 | 5.5 | 0.77 | 1.55 |
| 2.27 | 1.42 | 0.54 | 0.33 | | | 0.22 | |
| 2.28 | 3.00 | 1.14 | 0.69 | 28.6 | 5.4 | 1.21 | 1.26 |
| 2.29 | 1.41 | 0.53 | 0.32 | | | 0.58 | |
| 2.30 | 0.42 | 0.16 | 0.10 | | | 0.43 | |
| 2.31 | 0.09 | 0.03 | 0.02 | | | 0.07 | |
| 2.34 | 1.94 | 0.74 | 0.45 | | | 1.17 | 1.23 |
| 2.38 | 1.14 | 0.43 | 0.26 | | | 0.09 | |
| 2.39 | 2.50 | 0.95 | 0.57 | 28.2 | 4.8 | 0.78 | 1.14 |
| 2.40 | 2.02 | 0.77 | 0.46 | | | 0.47 | 0.99 |
| 2.41 | 1.16 | 0.44 | 0.27 | | | 0.08 | |
| 2.42 | 0.41 | 0.16 | 0.09 | | | 0.24 | |
| 2.46 | 2.46 | 0.93 | 0.57 | 16.1 | 4.6 | 1.07 | 1.3 |
| 2.47 | 1.83 | 0.69 | 0.42 | | | 0.31 | 1.54 |
| 2.48 | 2.50 | 0.95 | 0.58 | | | 1.36 | 1.76 |
| 2.49 | 0.50 | 0.19 | 0.12 | | | 0.74 | |
| 2.50 | 2.93 | 1.11 | 0.68 | 15.8 | 4.7 | 0.52 | 1.54 |
| 2.51 | 0.13 | 0.10 | 0.07 | | | 0.30 | |
| 2.52 | 1.11 | 0.79 | 0.56 | 22.1 | 5 | 1.14 | 1.93 |
| 2.53 | 1.87 | 1.34 | 0.94 | 29.8 | 7.8 | 0.58 | 2.84 |
| 2.54 | 1.85 | 1.32 | 0.92 | 15.9 | 8.5 | 0.12 | 2.56 |
| 2.55 | 0.83 | 0.60 | 0.42 | | | 0.32 | |
| 2.58 | 0.46 | 0.33 | 0.23 | | | 0.15 | |
| 2.60 | 0.99 | 0.71 | 0.50 | | | 0.35 | |
| 2.61 | 2.16 | 1.54 | 1.08 | 30.7 | 7.9 | 1.34 | 2.88 |
| 2.62 | 0.36 | 0.26 | 0.18 | | | 0.58 | |
| 2.63 | 0.37 | 0.26 | 0.18 | | | 0.41 | |
| 2.64 | 1.60 | 1.14 | 0.80 | 25.7 | 6.1 | 1.39 | 2.85 |
| 2.65 | 0.63 | 0.45 | 0.31 | | | 0.16 | |
| 2.66 | 0.08 | 0.06 | 0.04 | | | 0.06 | |
| 2.67 | 1.34 | 0.96 | 0.67 | 23.3 | 4.5 | 1.32 | 1.34 |
| 2.68 | 0.66 | 0.47 | 0.33 | | | 0.38 | |
| 2.69 | 2.79 | 1.99 | 1.39 | 46.3 | 9.7 | 1.47 | 1.68 |
| 2.73 | 1.47 | 1.05 | 0.73 | 28.5 | 7.2 | 1.04 | 1.85 |
| 2.74 | 1.99 | 1.43 | 1.00 | 39.5 | 19.1 | 1.22 | 1.69 |
| 2.75 | 1.46 | 1.04 | 0.73 | 25.6 | 7.5 | 0.68 | 1.55 |
| 2.76 | 1.61 | 1.15 | 0.81 | 27.7 | 7.7 | 0.98 | 1.79 |
| 2.77 | 1.59 | 1.13 | 0.79 | 27.7 | 4.9 | 1.11 | 1.53 |
| 2.78 | 1.55 | 1.11 | 0.77 | 13.9 | 8 | 1.51 | 2.64 |
| 2.79 | 0.33 | 0.24 | 0.16 | 10 | 5.4 | 0.43 | |
| 2.80 | 1.47 | 1.05 | 0.73 | 15.9 | 8.8 | 0.46 | 0.95 |
| R-690 | 2.00 | 1.43 | 1.00 | | | | |
| M-A20 | 1.40 | 1.00 | | 56.4 | 5 | | |
| R-690 | 3.76 | 3.44 | 1.00 | | | | |
| M-A20 | 1.09 | 1.00 | | | | | |
| 2.81 | 0.25 | 0.23 | 0.07 | | | 0.17 | |
| 2.82 | 0.44 | 0.40 | 0.12 | | | 0.49 | |
| 2.83 | 0.63 | 0.58 | 0.17 | | | 0.80 | |
| 2.84 | 0.13 | 0.12 | 0.04 | | | 0.55 | |
| 2.85 | 0.62 | 0.57 | 0.16 | | | 0.19 | |
| 2.86 | 0.87 | 0.79 | 0.23 | | | 0.16 | |
| 2.87 | 0.84 | 0.77 | 0.22 | | | 0.22 | |
| 2.89 | 5.88 | 5.37 | 1.56 | 45.9 | 37.9 | 0.07 | 0.73 |
| 2.90 | 0.23 | 0.21 | 0.06 | | | 0.60 | |
| 2.91 | −0.37 | −0.34 | −0.10 | | | 0.43 | |
| 2.92 | 0.59 | 0.54 | 0.16 | | | 0.14 | |
| 2.93 | 0.28 | 0.26 | 0.08 | | | 0.44 | |
| 2.94 | 0.32 | 0.29 | 0.08 | | | 0.46 | |
| 2.95 | 0.39 | 0.36 | 0.10 | | | 0.51 | |
| 2.96 | 0.36 | 0.33 | 0.10 | | | 0.26 | |
| 2.97 | 1.26 | 1.15 | 0.33 | 36.8 | 14.1 | 1.01 | 0.89 |
| 2.98 | 0.92 | 0.84 | 0.24 | | | 0.84 | |
| 2.99 | 1.38 | 1.26 | 0.37 | 91.2 | 81.8 | 0.29 | |
| 2.100 | 0.94 | 0.86 | 0.25 | | | 1.40 | |
| 2.102 | 0.77 | 0.70 | 0.21 | | | 0.17 | |
| 2.104 | 1.37 | 1.25 | 0.36 | 10.2 | 7.4 | 0.14 | |
| 2.105 | 0.63 | 0.58 | 0.17 | | | 1.04 | |
| 2.106 | 0.79 | 0.72 | 0.21 | | | 0.84 | |
| 2.107 | 0.81 | 0.74 | 0.22 | | | 0.06 | |
| 2.109 | 0.66 | 1.24 | 0.32 | 19.2 | 6.1 | 0.45 | 0.89 |
| 2.110 | 1.58 | 3.00 | 0.77 | 36.4 | 14.2 | 0.89 | 1.11 |
| 2.112 | 0.80 | 1.52 | 0.39 | 28.8 | 6.4 | 1.16 | 1.35 |
| 2.113 | 0.57 | 1.07 | 0.27 | 31.4 | 10.7 | 0.66 | 1.17 |
| 2.114 | 0.52 | 0.99 | 0.25 | | | 0.32 | |
| 2.115 | 1.02 | 1.94 | 0.50 | 19.9 | 10.7 | 0.63 | 1.13 |
| 2.116 | 0.52 | 0.98 | 0.25 | | | 0.86 | |
| 2.118 | 0.19 | 0.36 | 0.09 | | | 0.06 | |
| 2.119 | 0.78 | 1.48 | 0.38 | 20.4 | 5.3 | 1.22 | 1.16 |
| 2.120 | 0.76 | 1.44 | 0.37 | 21.8 | 6 | 1.29 | 0.97 |
| 2.121 | 1.24 | 2.36 | 0.60 | 28.7 | 10.7 | 0.30 | 1.17 |
| 2.122 | 1.20 | 2.29 | 0.58 | 31.3 | 8.3 | 1.13 | 1.14 |
| 2.123 | 0.67 | 1.27 | 0.33 | 17.7 | 6.8 | 0.74 | 1.27 |
| R-690 | 2.06 | 3.91 | 1.00 | | | | |
| M-A20 | 0.53 | 1.00 | | 56.4 | 5 | | |
| R-690 | 3.51 | | 1.00 | | | | |
| M-A20 | 2.91 | 1.00 | | | | | |
| 1.1 | 1.05 | 0.36 | 0.30 | | | 0.16 | |
| 1.2 | −0.42 | −0.14 | −0.12 | | | 0.40 | |
| 1.3 | 1.04 | 0.36 | 0.30 | | | 1.31 | |
| 1.4 | 0.77 | 0.26 | 0.22 | | | 0.43 | |
| 1.5 | 0.19 | 0.06 | 0.05 | | | 0.13 | |
| 1.6 | 1.07 | 0.37 | 0.30 | | | 0.42 | |
| 1.7 | 0.09 | 0.03 | 0.03 | | | 0.33 | 0.80 |
| 1.8 | 2.93 | 1.01 | 0.83 | 54.70 | 45.60 | 0.59 | |
| 1.9 | 1.17 | 0.40 | 0.33 | | | 0.93 | |
| 1.10 | −0.04 | −0.02 | −0.01 | | | 0.08 | |
| 1.11 | −0.30 | −0.10 | −0.09 | | | 0.16 | |
| 1.12 | 0.11 | 0.04 | 0.03 | | | 0.25 | |
| 1.13 | 1.60 | 0.55 | 0.46 | | | 0.08 | |
| 1.14 | 0.69 | 0.24 | 0.20 | | | 0.13 | |
| 1.15 | 0.30 | 0.10 | 0.09 | | | 0.08 | |
| 1.16 | 1.44 | 0.49 | 0.41 | | | 0.08 | |
| 1.17 | −0.31 | −0.10 | −0.09 | | | 0.36 | |
| 1.18 | 0.05 | 0.02 | 0.01 | | | 0.17 | |
| 1.19 | −0.34 | −0.12 | −0.10 | | | 0.29 | |
| 1.20 | 0.84 | 0.29 | 0.24 | | | 0.45 | |
| 1.21 | −0.20 | −0.07 | −0.06 | | | 0.28 | |
| 1.22 | 0.14 | 0.05 | 0.04 | | | 0.06 | |
| 1.23 | 0.14 | 0.05 | 0.04 | | | 0.08 | |
| 1.24 | 1.02 | 0.35 | 0.29 | | | 0.16 | |
| 1.25 | 0.27 | 0.28 | 0.16 | | | 0.20 | |
| 1.26 | 1.06 | 1.09 | 0.62 | | | 0.31 | |
| 1.27 | 1.07 | 1.10 | 0.63 | | | 0.96 | |
| 1.28 | 2.14 | 2.21 | 1.26 | 3.60 | ND | 0.06 | 0.73 |
| 1.29 | 1.11 | 1.15 | 0.65 | | | 0.44 | 1.64 |
| 1.30 | 0.79 | 0.81 | 0.46 | | | 0.19 | |
| 1.31 | 1.42 | 1.46 | 0.84 | | | 0.23 | 1.27 |
| 1.32 | 1.37 | 1.42 | 0.81 | | | 0.11 | 1.91 |
| 1.33 | 0.29 | 0.30 | 0.17 | | | 0.18 | |
| 1.34 | 1.59 | 1.64 | 0.94 | 37.53 | 8.98 | 1.31 | 2.61 |
| 1.35 | 0.37 | 0.38 | 0.21 | | | 0.32 | |
| 1.36 | 0.70 | 0.72 | 0.41 | | | 0.17 | |
| 1.37 | 1.21 | 1.24 | 0.71 | | | 0.69 | |
| 1.38 | 0.63 | 0.65 | 0.37 | | | 0.38 | |
| 1.39 | 0.87 | 0.90 | 0.51 | | | 0.07 | |
| 1.40 | 0.71 | 0.73 | 0.42 | | | 0.26 | |
| 1.41 | 1.36 | 1.40 | 0.80 | 43.82 | 13.65 | 0.37 | 2.03 |
| 1.42 | 0.64 | 0.66 | 0.38 | | | 1.10 | |
| 1.43 | 0.46 | 0.47 | 0.27 | | | 0.09 | |
| 1.44 | 0.52 | 0.54 | 0.31 | | | 0.28 | |
| 1.45 | 0.74 | 0.76 | 0.44 | | | 0.15 | |
| 1.46 | 0.81 | 0.83 | 0.48 | | | 0.07 | |
| 1.47 | 0.46 | 0.47 | 0.27 | | | 0.24 | |
| 1.48 | 0.62 | 0.63 | 0.36 | | | 0.27 | |
| R-690 | 1.70 | | 1.00 | | | | |
| M-A20 | 0.97 | 1.00 | | | | | |
| R-690 | 1.84 | | 1.00 | | | | |
| M-A20 | 2.82 | 1.00 | | | | | |
| 1.49 | 0.76 | 0.27 | 0.41 | | | 0.14 | |
| 1.50 | −0.22 | −0.08 | −0.12 | | | 0.36 | |
| 1.51 | −0.35 | −0.12 | −0.19 | | | 0.45 | |
| 1.52 | 1.84 | 0.65 | 1.00 | 45.74 | 9.90 | 1.40 | 2.44 |
| 1.53 | 1.77 | 0.63 | 0.96 | 42.79 | 24.70 | 0.89 | |
| 1.54 | 1.08 | 0.38 | 0.59 | | | 0.80 | |
| 1.55 | 0.81 | 0.29 | 0.44 | | | 0.35 | |
| 1.56 | 1.26 | 0.45 | 0.69 | | | 0.30 | |
| 1.57 | 3.26 | 1.16 | 1.77 | 22.20 | ND | 1.31 | 2.69 |
| 1.58 | 0.81 | 0.29 | 0.44 | | | 0.80 | |
| 1.59 | 2.22 | 0.79 | 1.21 | 24.50 | ND | 1.28 | 2.40 |
| 1.60 | 0.55 | 0.19 | 0.30 | | | 0.23 | |
| 1.61 | 0.13 | 0.04 | 0.07 | | | 0.06 | |
| 1.62 | 0.75 | 0.27 | 0.41 | 24.89 | 10.25 | 0.25 | |
| 1.63 | 0.99 | 0.35 | 0.54 | | | 0.12 | |
| 1.64 | 3.60 | 1.28 | 1.96 | | | 0.06 | 0.88 |
| 1.65 | 0.32 | 0.11 | 0.18 | | | 0.29 | |
| 1.66 | 0.01 | 0.00 | 0.00 | | | 0.30 | |
| 1.67 | 2.00 | 0.71 | 1.09 | 9.30 | ND | 0.38 | |
| 1.68 | 0.86 | 0.30 | 0.47 | | | 0.21 | |
| 1.69 | 3.31 | 1.17 | 1.80 | 8.50 | ND | 0.22 | 2.39 |
| 1.70 | 3.66 | 1.30 | 1.99 | 24.96 | 12.00 | 0.84 | 2.08 |
| 1.71 | 2.01 | 0.71 | 1.09 | | | 0.21 | |
| 1.72 | 6.49 | 2.30 | 3.53 | 6.50 | ND | 0.21 | 1.89 |
| 1.73 | 19.95 | 0.28 | 0.21 | 3.20 | ND | 0.31 | |
| 1.74 | 19.33 | 0.27 | 0.21 | 5.50 | ND | 0.20 | |
| 1.75 | 22.25 | 0.31 | 0.24 | | | 0.10 | |
| 1.76 | 11.42 | 0.16 | 0.12 | | | 0.37 | |
| 1.77 | −15.90 | −0.23 | −0.17 | | | 0.08 | |
| 1.78 | −4.60 | −0.07 | −0.05 | | | 0.26 | |
| 1.79 | 18.78 | 0.27 | 0.20 | | | 0.25 | |
| 1.80 | 35.51 | 0.50 | 0.38 | 9.00 | ND | 0.71 | |
| 1.81 | −4.15 | −0.06 | −0.04 | | | 0.33 | |
| 1.82 | −37.51 | −0.53 | −0.40 | | | 0.17 | |
| 1.83 | 7.11 | 0.10 | 0.08 | | | 0.08 | |
| 1.84 | −21.33 | −0.30 | −0.23 | | | 0.06 | |
| 1.85 | −3.61 | −0.05 | −0.04 | | | 0.13 | |
| 1.86 | −19.68 | −0.28 | −0.21 | | | 0.06 | |
| 1.87 | −3.39 | −0.05 | −0.04 | | | 0.30 | |
| 1.88 | 55.61 | 0.79 | 0.59 | 5.50 | ND | 0.10 | 1.25 |
| 1.89 | −6.73 | −0.10 | −0.07 | | | 0.17 | |
| 1.90 | 11.18 | 0.16 | 0.12 | | | 0.10 | |
| 1.91 | −31.50 | −0.45 | −0.33 | | | 0.13 | |
| 1.92 | −7.56 | −0.11 | −0.08 | | | 0.13 | |
| 1.93 | −12.37 | −0.18 | −0.13 | | | 0.11 | |
| 1.94 | 49.60 | 0.70 | 0.53 | 14.10 | ND | 1.39 | 2.33 |
| 1.95 | 10.68 | 0.15 | 0.11 | | | 0.16 | |
| 1.96 | 144.63 | 2.05 | | 63.24 | 74.75 | 0.75 | 0.80 |
| R-690 | 94.09 | 1.33 | 1.00 | | | | |
| M-A20 | 70.64 | 1.00 | | | | | |
| R-690 | 7.59 | | 1.00 | | | | |
| M-A20 | 5.33 | 1.00 | | | | | |
| 1.97 | 1.47 | 0.28 | 0.19 | | | 0.37 | |
| 1.98 | 3.69 | 0.69 | 0.49 | 38.67 | 16.57 | 0.43 | 1.69 |
| 1.99 | 4.32 | 0.81 | 0.57 | 38.31 | 18.76 | 0.40 | 1.48 |
| 1.100 | 0.22 | 0.04 | 0.03 | | | 0.32 | |
| 1.101 | 2.06 | 0.39 | 0.27 | | | 0.49 | |
| 1.102 | 0.23 | 0.04 | 0.03 | | | 0.12 | |
| 1.103 | 0.33 | 0.06 | 0.04 | | | 0.28 | |
| 1.104 | 0.45 | 0.08 | 0.06 | | | 0.08 | |
| 1.105 | 4.19 | 0.79 | 0.55 | 37.19 | 12.41 | 0.25 | 2.18 |
| 1.106 | 4.22 | 0.79 | 0.56 | 46.24 | 30.59 | 1.21 | 1.58 |
| 1.107 | 0.15 | 0.03 | 0.02 | | | 0.06 | |
| 1.108 | 0.08 | 0.01 | 0.01 | | | 0.31 | |
| 1.109 | 2.70 | 0.51 | 0.36 | 6.5 | 6 | 0.07 | |
| 1.110 | 1.02 | 0.19 | 0.13 | | | 0.35 | |
| 1.111 | 2.55 | 0.48 | 0.34 | | | 0.10 | |
| 1.112 | 3.58 | 0.67 | 0.47 | 18.6 | 4.2 | 1.25 | 1.74 |
| 1.113 | 0.37 | 0.07 | 0.05 | | | 0.35 | |
| 1.114 | −0.06 | −0.01 | −0.01 | | | 0.27 | |
| 1.115 | 0.55 | 0.10 | 0.07 | | | 0.13 | |
| 1.116 | 2.24 | 0.42 | 0.30 | | | 0.44 | |
| 1.117 | 0.56 | 0.10 | 0.07 | | | 0.27 | |
| 1.118 | 0.77 | 0.14 | 0.10 | | | 0.43 | |
| 1.119 | 0.78 | 0.15 | 0.10 | | | 0.41 | |
| 1.120 | 0.73 | 0.14 | 0.10 | | | 0.58 | |
| 1.121 | 0.21 | 0.05 | 0.03 | | | 0.40 | |
| 1.122 | 0.11 | 0.03 | 0.02 | | | 0.29 | |
| 1.123 | 0.41 | 0.11 | 0.07 | | | 0.07 | |
| 1.124 | 3.66 | 0.95 | 0.61 | 41.27 | 34.83 | 0.28 | 1.85 |
| 1.125 | 2.67 | 0.69 | 0.44 | | | 0.27 | 1.55 |
| 1.126 | 2.36 | 0.61 | 0.39 | | | 0.86 | 1.71 |
| 1.127 | 0.70 | 0.18 | 0.12 | | | 0.11 | |
| 1.128 | 2.99 | 0.77 | 0.50 | | | 0.13 | 1.45 |
| 1.129 | 0.33 | 0.09 | 0.06 | | | 0.39 | |
| 1.130 | 0.40 | 0.10 | 0.07 | | | 0.18 | |
| 1.131 | 1.45 | 0.38 | 0.24 | | | 0.52 | |
| 1.132 | 0.33 | 0.08 | 0.05 | | | 0.25 | |
| 1.133 | 0.17 | 0.04 | 0.03 | | | 0.24 | |
| 1.134 | 0.86 | 0.22 | 0.14 | | | 0.15 | |
| 1.135 | 1.75 | 0.45 | 0.29 | | | 0.30 | |
| 1.136 | 1.35 | 0.35 | 0.23 | | | 0.07 | |
| 1.137 | 2.30 | 0.59 | 0.38 | | | 0.83 | 1.30 |
| 1.138 | 0.83 | 0.21 | 0.14 | | | 0.60 | |
| 1.139 | 1.57 | 0.41 | 0.26 | | | 0.55 | |
| 1.140 | 1.40 | 0.36 | 0.23 | | | 1.28 | |
| 1.142 | −0.10 | −0.03 | −0.02 | | | 0.26 | |
| 1.143 | 1.46 | 0.38 | 0.24 | | | 0.16 | |
| 1.144 | 2.41 | 0.62 | 0.40 | | | 0.76 | |
| R-690 | 6.00 | | 1.00 | | | | |
| M-A20 | 3.86 | 1.00 | | 56.4 | 5 | | |
| R-690 | 2.58 | 3.22 | 1.00 | | | | |
| M-A20 | 0.80 | 1.00 | | | | | |
| 1.145 | 0.23 | 0.29 | 0.09 | | | 0.18 | |
| 1.146 | −0.12 | −0.15 | −0.05 | | | 0.41 | |
| 1.147 | 0.14 | 0.18 | 0.06 | | | 0.31 | |
| 1.148 | 0.09 | 0.11 | 0.03 | | | 0.43 | |
| 1.149 | 0.39 | 0.49 | 0.15 | | | 0.37 | |
| 1.150 | 2.23 | 2.79 | 0.87 | 17.3 | 5.4 | 0.70 | 1.46 |
| 1.151 | 0.13 | 0.16 | 0.05 | | | 0.29 | |
| 1.152 | 0.55 | 0.69 | 0.21 | | | 0.33 | |
| 1.154 | −0.20 | −0.25 | −0.08 | | | 0.41 | |
| 1.155 | 0.16 | 0.19 | 0.06 | | | 0.23 | |
| 1.156 | 0.06 | 0.07 | 0.02 | | | 0.31 | |
| 1.158 | 0.54 | 0.67 | 0.21 | | | 0.58 | |
| 1.159 | 0.78 | 0.98 | 0.30 | | | 0.09 | |
| 1.160 | 0.23 | 0.29 | 0.09 | | | 0.08 | |
| 1.162 | 0.63 | 0.78 | 0.24 | | | 0.11 | |
| 1.163 | 0.20 | 0.25 | 0.08 | | | 0.10 | |
| 1.164 | 0.22 | 0.27 | 0.08 | | | 0.09 | |
| 1.166 | 1.41 | 1.76 | 0.55 | 22.9 | 5.3 | 0.52 | 2.41 |
| 1.167 | 0.32 | 0.40 | 0.12 | | | 0.08 | |
| 1.168 | 0.88 | 1.10 | 0.34 | 15.9 | 5.1 | 0.48 | 1.90 |
| 1.170 | 0.22 | 0.42 | 0.11 | | | 0.21 | |
| 1.171 | 0.40 | 0.76 | 0.19 | | | 0.38 | |
| 1.172 | 0.09 | 0.17 | 0.04 | | | 0.12 | |
| 1.174 | 0.23 | 0.43 | 0.11 | | | 0.15 | |
| 1.175 | 0.14 | 0.26 | 0.07 | | | 0.20 | |
| R-690 | 2.06 | 3.91 | 1.00 | | | | |
| M-A20 | 0.53 | 1.00 | | 56.4 | 5 | | |

for 1.170 to 1.175
FI-fluorescence intensity of primary antibody
CFI-fluorescence intensity of human irrelevant primary antibody.
A20-mouse anti-L762P monoclonal antibody
R690-rabbit anti-L762P affinity purified polyclonal antibody
FACS VRL762-percent positive cells from transient transfection of VR1013/L762 expression plasmid
FACS VR(−)-percent positive cells from transient transfection of empty VR1013 expression plasmid

### Example 32

### Epitope Mapping and Purification of HL523S-Specific Antibodies

[0941] This Example describes the purification of L523S antibodies that can distinguish between human and mouse L523S homologs and will likely distinguish between hL523S and hL523S-family members such as hIMP-1 and hIMP-2.

[0942] L523S (full-length cDNA and amino acid sequence set forth in SEQ ID NO:347 and 348, respectively) is one of a family of proteins that includes hIMP-1 and hIMP-2. The members of this family of proteins have a high degree of similarity one to the other and are also highly similar between species. Thus, generating antibodies that specifically recognize human L523S (hL523S) and not other members of the protein family in humans or the mouse homologs, has been problematic. However, in order to evaluate preclinical and clinical L523S DNA/Adenoviral vaccines by detecting the protein expression of L523S, human L523S-specific antibodies are critical.

[0943] Polyclonal antibodies specific for hL523S were generated as described in Example 23. These antibodies were used to map epitopes. The epitope analysis showed 2 particular peptides of hL523S that were recognized, peptide 16/17 and peptide 32.

[0944] The amino acid sequences of both hL523S and mouse L523S (mL523S) peptide 16/17 and peptide 32 were then compared. Peptide 32/33 is identical between hL523S and mL523S. However, as the alignment below indicates, peptide 16/17 has 5 amino acid differences between the human and mouse homologs (underlined).

| | |
|---|---|
| hL523S (16/17): | |
| IPDEMAAQQNPLQQPRGRRGLGQR | (SEQ ID NO:468) |
| mL523S (16/17): | |
| IPDETAAQQNPSPQLRGRRGPGQR | (SEQ ID NO:469) |

[0945] Moreover, peptide-based ELISAs showed that peptide 17 is specifically recognized by lung cancer patient sera #197, and a homology search of peptide 17 between human IMP (hIMP) family members shows that there is little similarity in this region between family members. The hL523S peptide 17 (and 16/17) has less than 50% similarity to hL523S family members such as hIMP-1 and hIMP-2.

[0946] Based upon the epitope mapping of L523S-specific antibodies and the data from the homology search, hL523S or mL523S peptide 16/17-conjugated ligands were then used to purify human or mouse L523S-specific antibodies from rabbit polyclonal antibodies generated against hL523S protein as described in Example 23. The data from the antibodies purified by affinity chromatography using ligands conjugated with either hL523S-peptide 16/17 or mL523S-peptide 16/17 suggested that the affinity of antibodies specific to hL523S-peptide 16/17 is much higher than that of antibodies to mL523S-peptide 16/17 since they bind more strongly to hL523S-peptide 16/17 than to mL523S-peptide 16/17. The difference in affinity between the purified antibodies to human and mouse L523S-peptide 16/17 was confirmed by peptide-based ELISA. The antibodies purified by hL523S-peptide 16/17 selectively bind to human L523S-peptide 16/17 but bind much less or not at all to mL523S-peptide 16/17.

[0947] In order to further characterize the original polyclonal antibodies and antibodies purified by hL523S-peptide 16/17, immunoblot analysis was conducted using both human lung adenocarcinoma line as a source of hL523S protein and mouse whole body embryo (day 17 gestation) as the source of mL523S protein. This analysis showed that polyclonal antibodies specific for hL523S recognize hL523S protein expressed in the tumor cell line as well as mL523S protein expressed in whole body embryos of day 17 gestation. However, the addition of hL523S peptide 32/33 blocks binding of antibodies to human and mouse L523S proteins. Thus, the crossreactivity of the polyclonal antibodies to mL523S protein is due to the existence of antibodies specific to hL523S peptide 32/33. In marked contrast, the purified antibodies specific to hL523S peptide 16/17 do not bind mL523S protein expressed in mice embryos but do recognize hL523S protein expressed in human lung adenocarcinoma cells. These data confirm the ELISA data using hL523S-peptide 16/17 and mL523S-peptide 16/17 described above.

[0948] The amino acid sequence of hL523S peptide 16/17 used to purify the antibodies is about 60-70% similar to that of the mL523S-peptide 16/17 which is not recognized by hL523S-specific antibodies by Western blot analysis and peptide-based ELISA. The hL523S peptide 16/17 has less than 50% similarity to hL523S family members such as hIMP-1 and hIMP-2. Taken together, these data suggest that it is highly probable that the antibodies purified by hL523S peptide 16/17 described herein will also distinguish hL523S protein from the other hL523S family members.

[0949] In summary, antibodies purified with the hL523S peptide 16/17 do not recognize the mouse L523S homolog. The amino acid sequence of peptide 16/17 between hL523S family members is less similar than between human and mouse L523S. Thus, the hL523S-specific antibodies described above can be used to distinguish between human and mouse L523S and between members of the hL523S family of proteins and can therefore be used for the accurate detection of hL523S protein expression in animals and humans.

### Example 33

### in vivo Immunogenecity of Lung Tumor Antigen L523

[0950] This example describes two in vivo immunogenicity studies to evaluate the vaccination of mice with either an adenovirus containing L523 or with L523 naked DNA followed by a second immunization with an adenovirus containing L523.

[0951] The first study involved the immunization of two strains of mice with L523 adenovirus. The C57B16 strain of mice is homozygous for HLA-type H-2, while strain B6D2(F1) is heterozygous for the HLA-type, H-2. Table 14 describes the initial immunization strategy employed.

TABLE 14
Immunization with L523 Adenovirus alone: Experimental Design

| Group | Immunization | Strain (4/group) |
|---|---|---|
| 1 | 10⁸ PFU Ad L523 A | C57BL6 |
| 2 | 10⁷ PFU Ad hrGFP A | C57BL6 |
| 3 | 10⁸ PFU Ad L523 A | B6D2(F1) |
| 4 | 10⁷ PFU Ad hrGFP A | B6D2(F1) |
| 5 | Naïve | C57BL6 |
| 6 | Naïve | B6D2(F1) |

PFU = plaque forming unit;
GFP = green fluorescent protein;
Ad = adenovirus.

[0952] Mice were immunized intradermally with either 10⁸ PFU of L523-adenovirus or 10⁷ PFU of an irrelevant adenovirus (hrGFP). Three weeks following immunization, IgG1 and IgG2a antibody responses to L523 were examined in all groups of mice. Briefly, recombinant full length L523 (rL523) was coated onto ELISA plates and serum, at multiple dilutions, was added to the wells. Following a 60-minute incubation, the serum was washed from the wells and a secondary antibody, either specific for an IgG1 or IgG2a was added to the plates. Both antibodies were directly conjugated to horseradish peroxide (HRP). The levels of L523 antibodies, either IgG1 or IgG2a, were measured in all groups. In the C57BL6 mice, little to no L523-specific antibodies were detected following immunization. However, in the B6D2(F1) strain of mice immunized with L523 adenovirus, both IgG1 and IgG2a L523-specific antibodies were detected at serum dilution as low as 1/1000.

[0953] In addition to detecting L523-specific antibodies in the serum, interferon-gamma (IFN-γ) responses were assayed from immune spleen cells following in vitro stimulation with rL523 protein. Briefly, spleen cells were harvested from all mice groups and cultured for 3 days in 96-well plates. Culture conditions included, media alone, 1 or 10 μg/ml of rL523 protein, or 5 μg/ml of concanavalin A (Con A). After 3 days, the supernatants were harvested and assayed for IFN-γ levels in the supernatants.

[0954] Immunization with L523-adenovirus, but not an irrelevant adenovirus, elicited a strong IFN-γ response from the spleen cells which were stimulated with rL523. In general, responses were stronger in the B6D2(F1) mouse strain, as evidenced by both a higher level of IFN-γ production, as well as the fact that stimulation with a lower antigen concentration (1 μg/ml) elicited an equally strong response as seen with the higher antigen concentration (10 μg/ml).

[0955] Finally, T cell proliferation responses were assayed from immune spleen cells by stimulation in vitro with rL523 protein. Briefly, spleen cells were cultured for 4 days in 96-well plates with, media alone, 1 or 10 μg/ml of rL523 protein, or Con A. The cultures were then pulsed with 3H-thymidine for the final 8 hours of culture. Results are represented as the stimulation index (SI) in the presence of antigen relative to stimulation with media alone. Results were consistent with those obtained in the IFN-γ assay. Immunization with L523 adenovirus, but not an irrelevant adenovirus, elicited a proliferation response in spleen cells stimulated with rL523. A strong SI (average of >20) was observed in spleen cells harvested from the B6D2(F1) mouse strain, with similar levels of proliferation observed at both protein concentrations. Little or no T cell proliferation was observed in the C57BL6 mouse strain.

[0956] A second study involved the immunization of two strains of mice initially with L523 naked DNA followed by a second immunization with L523 adenovirus two weeks later. The mice were harvested 3 weeks after the boost. Table 15 describes the immunization regimen of the second study.

TABLE 15
Immunization with L523 DNA followed by a second immunization
with L523-Adenovirus: Experimental Design

| | | |
|---|---|---|
| Group | Immunization | Strain (4/group) |

1

| | | |
|---|---|---|
| L523 DNA + 10⁸ PFU Ad L523 A | C57BL6 | |
| 2 | 10⁸ PFU Ad L523 A | C57BL6 |
| 3 | Irrelevant DNA + 10⁷ PFU Ad hrGFP A | C57BL6 |
| 4 | 10⁷ PFU Ad hrGFP A | C57BL6 |
| 5 | Naïve | C57BL6 |
| 6 | L523 DNA + 10⁸ PFU Ad L523 A | B6D2(F1) |
| 7 | 10⁸ PFU Ad L523 A | B6D2(F1) |
| 8 | Irrelevant DNA + 10⁷ PFU Ad hrGFP A | B6D2(F1) |
| 9 | 10⁷ PFU Ad hrGFP A | B6D2(F1) |
| 10 | Naïve | B6D2(F1) |

PFU = plaque forming unit;
GFP = green fluorescent protein;
Ad = adenovirus.

[0957] As described in the first study, strong IgG1 and IgG2a antibody responses were observed in B6D2(FI) mice following immunization with L523-adenovirus. Immunizing with L523 DNA appeared to increase the overall L523-specific antibody response compared to responses achieved with immunization with L523-adenovirus alone. C57BL6 mice elicited little or no L523-specific antibody responses following immunization with L523-adenovirus, but were some slightly positive responses were detected in mice immunized with L523 DNA followed by a second immunization with L523-adenovirus.

[0958] IFN-γ responses were assayed from immune spleen cells by stimulation in vitro with rL523 protein. These results confirm those observed in the initial study demonstrating the immunogenecity of L523 in animals. The results also suggest that initially immunizing the animals with L523 DNA, prior to immunization with L523-adeonvirus, does not significantly increase the CD4 response. As with the initial study, responses appear to be stronger in the B6D2(F1) strain of mice than the C57BL6 strain.

[0959] As with the initial study, T cell proliferation responses were assayed from immune spleen cells by stimulation in vitro with rL523 protein. The results from using two rounds of immunization are consistent with those obtained from the first study. Immunization with L523 DNA prior to a second round of immunization with L523-adenovirus did not significantly increase the proliferation responses generated in the mice. As with the first study, responses were stronger in the B6D2(FI) mouse strain than in the C57BL6 strain.

[0960] The difference in HLA types between the two strains of mice could explain variations in the extent of the immune responses detected. As described above, the C57BL6 strain is homozygous for H-2^{b}, while the B6D2(FI) is heterozygous for H-2^{b/d}. The increased diversity of the B6D2(F 1) strains HLA type allows for a greater number of epitopes derived from the L523 protein to be presented. In this strain, epitopes specific for both H-2^{b} and H-2^{d} can be presented, while only H-2^{b} epitopes can be presented by the C57BL6 strain.

### Example 34

### Generation of Mouse Monoclonal Antibodies to L523S Recombinant Protein

[0961] This example describes the generation of mouse monoclonal antibodies specific for the lung tumor antigen, L523S. These data show that L523S is immunogenic and support its use to generate B cell immune responses in vivo. Further, the antibodies generated herein can be used in diagnostic and passive immunotherapeutic applications.

[0962] Production and purification of proteins used for antibody generation: E. coli expressing recombinant L523S protein were grown overnight in LB Broth with the appropriate antibiotics at 37° C. in a shaking incubator. The next morning, 10 ml of the overnight culture was added to 500 ml of 2× YT plus appropriate antibiotics in a 2L-baffled Erlenmeyer flask. When the optical density (at 560 nanometers) of the culture reached 0.4-0.6, the cells were induced with IPTG (1 mM). Four hours after induction with IPTG the cells were harvested by centrifugation. The cells were then washed with phosphate buffered saline and centrifuged again. The supernatant was discarded and the cells were either frozen for future use or immediately processed. Twenty milliliters of lysis buffer was added to the cell pellets and vortexed. To lyse the E. coli cells, this mixture was then run through the French Press at a pressure of 16,000 psi. The cells were then centrifuged again and the supernatant and pellet were checked by SDS-PAGE for the partitioning of the recombinant protein. For proteins that localized to the cell pellet, the pellet was resuspended in 10 mM Tris pH 8.0, 1% CHAPS and the inclusion body pellet was washed and centrifuged again. This procedure was repeated twice more.

[0963] The washed inclusion body pellet was solubilized with either 8 M urea or 6 M guanidine HCl containing 10 mM Tris pH 8.0 plus 10 mM imidazole. The solubilized protein was added to 5 ml of nickel-chelate resin (Qiagen) and incubated for 45 min to 1 hour at room temperature with continuous agitation. After incubation, the resin and protein mixture were poured through a disposable column and the flow through was collected. The column was then washed with 10-20 column volumes of the solubilization buffer. The antigen was then eluted from the column using 8M urea, 10 mM Tris pH 8.0 and 300 mM imidazole and collected in 3 ml fractions. A SDS-PAGE gel was run to determine which fractions to pool for further purification. As a final purification step, a strong anion exchange resin such as Hi-Prep Q (Biorad) was equilibrated with the appropriate buffer and the pooled fractions from above were loaded onto the column. Each antigen was eluted off of the column with an increasing salt gradient. Fractions were collected as the column was run and another SDS-PAGE gel was run to determine which fractions from the column to pool. The pooled fractions were dialyzed against 10 mM Tris pH 8.0. This material was then submitted to Quality Control for final release. The release criteria were purity as determined by SDS-PAGE or HPLC, concentration as determined by Lowry assay or Amino Acid Analysis, identity as determined by amino terminal protein sequence, and endotoxin level was determined by the Limulus (LAL) assay. The protein was then vialed after filtration through a 0.22-micron filter and the antigens were frozen until needed for immunization.

[0964] To generate anti-L523S mouse monoclonal antibodies, mice were immunized IP with 50 micrograms of recombinant L523S protein that had been mixed to form an emulsion with an equal volume of Complete Freund's Adjuvant (CFA). Every three weeks animals were injected IP with 50 micrograms of recombinant L523S protein that had been mixed with an equal volume of IFA to form an emulsion. After the fourth injection, spleens were isolated and standard hybridoma fusion procedures were used to generate anti-L523S mouse monoclonal antibodies.

[0965] Anti-L523S monoclonal antibodies were screened by ELISA analysis using the bacterially expressed recombinant L523S protein as follows. 96 well plates were coated with antigen by incubating with 50 microliters (typically 1 microgram) at 4° C. for 20 hours. 250 microliters of BSA blocking buffer was added to the wells and incubated at RT for 2 hours. Plates were washed 6 times with PBS/0.01% tween. Fifty microliters of each undiluted monoclonal supernatant were added per well and incubated at room temperature for 30 minutes. Plates were washed as described above before 50 microliters of goat anti-mouse horse radish peroxidase (HRP) at a 1:10000 dilution was added and incubated at RT for 30 minutes. Plates were washed as described above and 100 μl of TMB Microwell Peroxidase Substrate was added to each well. Following a 15 minutes incubation in the dark at room temperature the calorimetric reaction was stopped with 100 μl 1N H2SO₄ and read immediately at 450 nm. A list of the mouse anti-L523S monoclonal antibodies that were generated, as well as their reactivity in an ELISA assay and Western blot are shown in Table 16. For Western blot analysis, recombinant L523S protein was diluted with SDS-PAGE loading buffer containing beta-mercaptoethanol, then boiled for 10 minutes prior to loading the SDS-PAGE gel. Protein was transferred to nitrocellulose and probed with each of the anti-L523S hybridoma supernatants. Anti-mouse-HRP was used to visualize the anti-L523S reactive bands by incubation in ECL substrate.

TABLE 16
ELISA and WESTERN BLOT ANALYSIS OF
L523S MONOCLONAL ANTIBODIES

| | | |
|---|---|---|
| L523S Mouse | | Western Blot |
| Monoclonal | ELISA | HPP14 |

| Supernatant | L523S | Irrelevant | (Irrelevant | L523S |
|---|---|---|---|---|
| 213C3 | + | + | ND | ND |
| 213C49 | + | + | ND | ND |
| 213C62 | + | + | ND | ND |
| 213C69 | + | − | − | + |
| 213C80 | + | − | − | + |

ND: not determined

[0966] The data described in the above example show that L523S is immunogenic and can be used to generate B cell immune responses in vivo. Further, the antibodies generated herein have utility in diagnostic and passive immunotherapeutic applications.

### Example 35

### L523S-Specific T Cells and Identification of L523S T Cell Epitopes

[0967] This example describes the identification of specific epitopes recognized by L523S antigen-specific T cells. These experiments further confirm the immunogenicity of the L523S protein and support its use as a target for vaccine and/or other immunotherapeutic approaches.

[0968] A pool of 20-mer peptides, overlapping by 10 amino acids, that span the entire amino acid sequence of L523S (full length amino acid sequence of L523S provided in SEQ ID NO: 176) was used in in vitro culture with T cells derived from normal donor PBMC to expand CD4 and CD8 T cells. Cultures were established from multiple donors and T cell responses were monitored following successive in vitro stimulations. L523S-specific T cell responses were detected in 4 of 4 normal donors. Given that a number of tumor antigens are identified for each tumor type that are reasonable vaccine candidates, this methodology can be used to compare the antigen-specific T cell frequency of different antigens.

[0969] T cell lines were generated from normal donor PBMCs. The source of T cells was from the CD69 negative population of PBMCs that had been precultured for 1-2 days. Several different priming conditions were evaluated to identify the most efficient method. These conditions are summarized in Table 17. In all assays, the T cells were initially primed with one of the conditions described in Table 17, plus IL-12 for 2-3 days. 11-2 and IL-7 were then added to the cultures which were further cultured for one week. The cultures were then restimulated 2 or 3 times with PBMCs pulsed with the entire pool of overlapping L523S peptides. The cells were collected following the last restimulation and analyzed for antigen-specificity using an IFN-γ solubilized ELISPOT assay. As shown in Table 17, priming cultures with peptide pulsed dendritic cells (DCs) was the most effective for generating antigen-specific T cell lines, either in 96 well or 24 well plates.

TABLE 17
CONDITIONS USED TO PRIME DONOR T CELLS
WITH L523S OVERLAPPING PEPTIDES.

| Condition: | | | | | |
|---|---|---|---|---|---|
| A | Peptide-pulsed PMBCs/irradiated (overnight pulse, | | | | |
| | irradiated 11 minutes) | | | | |
| B | Peptide-pulsed DCs/irradiated (overnight pulse, | | | | |
| | irradiated 11 minutes) | | | | |
| C | Peptide-pulsed PBMCs/fixed (overnight pulse, | | | | |
| | 30 second PFA fix) | | | | |
| D | Peptide-pulsed PBMCs/mitomycin C-treated 30 minutes | | | | |
| | (overnight pulse) | | | | |
| | | | | Assay | |
| | | | | (solubilized | |
| | Condition (type of plate) | | | ELISPOT) | T cell |
| | | | Stimulation | Target | re- |
| Experiment: | Prime | Simulation 1 | 2-3 | Cells | sponse |
| I | A | A (96U) | A (24F) | D (96U) | + |
| | (96U) | | | | |
| II | B | A (96U) | A (24F) | D (96U) | +++ |
| | (96U) | | | | |
| III | C | C (96U) | C (96U) | C (96U) | − |
| | (96U) | | | | |
| IV | B | A (24F) | A (24F) | D (96U) | +++ |
| | (24F) | | | | |

Abreviations:
96U: 96 well, U-bottomed plates;
24F: 24 well, flat-bottomed plates.

[0970] Further analysis of the T cell lines generated as described above showed that these lines generally recognized target cells pulsed with whole protein antigen as well as peptides, demonstrating that at least some of the epitopes identified are naturally processed. Additional analysis using anti-MHC Class I and Class II antibodies showed that, while some of the T cell response was MHC class I restricted (CD8+ T cell-mediated), most of the T cell response generated using this method was MHC class II restricted, and thus mediated by CD4+ T cells.

[0971] Following the generation of the T cell lines using a pool of overlapping peptides spanning the entire L523S molecule, target cells pulsed with pools of fewer peptides breaking the L523S into smaller regions were then used to further map the epitopes recognized by the line generated from 4 different donors. Table 18 summarizes the epitope mapping analysis using different conditions described in Table 17. The amino acid sequences of those pools of overlapping peptides that included an epitope (pools 1-6, 14-19, 20-25, 26-30.5, 31-36, 37-40.5, 41-46.5, and 47-53) are provided in SEQ ID NO:470-477. Minimal epitope mapping using T cells from an additional donor, D366, demonstrated that peptide #4 (SEQ ID NO:470) was recognized in this donor.

TABLE 18
SUMMARY OF L523S EPITOPE ANALYSIS

| | Peptide | | | | | | | | |
|---|---|---|---|---|---|---|---|---|---|
| Donor- | Pool | | | | | | | | |
| Condition: | 1-6 | 7-13 | 14-19 | 20-25 | 26-30.5 | 31-36 | 37-40.5 | 41-46.5 | 47-53 |
| D223-IV | | | | | + | | | | |
| D223-I | | | | + | + | | | | + |
| D366-II | + | | | | | + | + | + | |
| D366-I | | | | | | | | + | |
| D446-II | | | | | + | + | | + | |
| D446-I | | | + | | + | | | | |
| D35 | | | | | | + | | | |

[0972] In an additional study, donor D446 was further evaluated for T cell responses against 2 other lung-specific antigens in addition to L523S. T cell lines were generated and epitopes identified from donor D446 using overlapping peptides for all three lung-specific antigens. This experiment demonstrated that a single donor can have T cell responses to multiple antigens, including L523S. In a related study, 3 different donors were analyzed for their T cell response to the same lung-specific antigen. All three donors recognized different epitopes of this antigen. Therefore, these data support the use of multiple epitopes from multiple lung tumor antigens, including L523S, in vaccine strategies for lung cancers.

[0973] In summary, a peptide pool of overlapping 20-mer peptides spanning the entire L523S protein were used to generate T cell lines and to map T cell epitopes recognized by these lines. Most, but not all, the T cell lines also recognized whole protein pulsed target cells suggesting that at least some of the epitopes are naturally processed. Furthermore, the responses to targets pulsed with pooled or individual peptides were equal or higher than those to target cells pulsed with whole protein showing that this technique is more sensitive for detecting immune responses. Moreover, this technique can be used for all individuals, regardless of their HLA type. An additional advantage of this approach to evaluating T cell responses to lung-specific antigens is responses to E. coli and viral antigens is avoided. Given that a number of tumor antigens can be identified for a given tumor type that are attractive vaccine candidates, this methodology can be used to compare the antigen-specific T cell frequency of different antigens.

[0974] The experiments described above further confirm the immunogenicicty of the L523S lung tumor antigen and support its use as a target for vaccine and other immunotherapeutic approaches. Further, the above experiments identify specific epitopes of the L523S protein that may be of particular importance in the deveolpment of such approaches.

### Example 36

### Viral-Mediated Delivery of L523S in vivo

[0975] This example describes the generation of an illustrative adenovirus vector expressing the L523S lung tumor antigen. This vector was used in in vivo immunogenicity studies, such as those described in Examples 33 and 37. This and other viral vectors have utility in DNA-based vaccination and/or immunotherapeutic strategies for L523S-associated cancers.

[0976] A replication defective E1 and E3 deleted human adenovirus serotype 5 vector expressing human L523S under the control of the CMV promoter was generated using standard molecular biology techniques. The cDNA sequence of the Adenovirus-L523S vector is set forth in SEQ ID NO:479. The cDNA sequence encoding the full-length L523S protein is set forth in SEQ ID NO:478 with the corresponding amino acid sequence set forth in SEQ ID NO:480. Infection of human cells with this construct was shown by immunoblot analysis to lead to high level expression of the L523S protein.

[0977] The antigenic nature of the adenoviral proteins introduced into and produced in the host cell during the course of infection act to increase immune surveillance and recognition of L523S as an immunological target. Thus, this adenoviral vector expressing high levels of the L523S tumor antigen has particular utility in inducing therapeutic or curative immune responses against endogenous tumor cells expressing L523S in lung cancer patients.

### Example 37

### In vivo Immunogenecity of Lung Tumor Antigen L523S

[0978] This Example further validates the use of L523S DNA and L523S adenovirus prime/boost regimens in generating in vivo immune responses to this lung tumor antigen in vivo. Further, murine CD4 and CD8 T cell epitopes of human L523S are described herein. The results described herein provide support for the use of L523S DNA and adenovirus prime/boost regimen as a vaccine strategy for treating L523S-associated cancers.

[0979] The results demonstrated that the vaccination strategy of immunization with L523S DNA followed by boosting with L523S adenovirus elicits strong CD4 and CD8 T cell responses as well as antibody responses. These results further showed that C57B1/6 mice elicit a predominately strong CD8 T cell response, whereas B6D2F 1 mice elicit a predominately strong CD4 and antibody response to L523S. The CD8 T cell epitope was identified as being contained in the region corresponding to animo acids 9-27 (LSENAAPSDLESIFKDAKI; set forth in SEQ ID NO:481) of the L523S protein. The CD4 epitope(s) were identified as being contained in the region corresponding to animo acids 33-75 (FLVKTGYAFVDCPDESWALKAIEALSGKIELHGKPIEVEHSVP; set forth in SEQ ID NO:482) of the L523S protein. Minimal epitopes required for T cell recognition of both the CD4 and CD8 epitopes are currently being identified.

[0980] This study involved the immunization of two strains of mice initially with L523S naked DNA followed by a second immunization with L523S adenovirus (see Example 36) two weeks later essentially as described in Example 33. The mice were harvested at day 35 post boost. Table 19 describes the immunization regimen of the second study.

TABLE 19
Immunization with L523 DNA followed by a second immunization
with L523-Adenovirus: Experimental Design

| Group | Prime (d0) | Boost (d14) | Strain (8/group) |
|---|---|---|---|
| 1 | 100 ug L523S | 10⁸ PFU Ad L523 A, i.d | B6 |
| | DNA*, i.m. | | |
| 2 | 100 ug L523S | 10⁸ PFU Ad L523 A, i.d | (B6D2) Fl |
| | DNA, i.m. | | |
| 3 | Naïve | | (B6D2) Fl and B6 |

PFU = plaque forming unit;
Ad = adenovirus.
*L523S was cloned into the pVAX vector (Invitrogen, Carlsbad, CA) using standard techniques.

[0981] Multiple CD8 and CD4 T cell assays were used to determine the in vivo immunogenicity of L523S DNA/adenovirus prime boost strategy and to identify the specific epitopes being recognized.

[0982] CD8 T Cell Assays:

[0983] Pools of overlapping 15-mer peptides spanning the entire L523S protein were used to directly stimulate spleen cells. IFNγ producing cells were analyzed by IFNγ ELISPOT following a 48 hour stimulation. This experiment showed that strong CD8 T cells specific for L523S peptides 3 and 4 within pool 1, corresponding to amino acids 9-27 of the L523S protein (LSENAAPSDLESIFKDAKI; set forth in SEQ ID NO:481) were present in L523S immunized C57b1/6 mice, but not in immunized B6D2F1 mice. Spleen cells stimulated for 6 hours with pools of overlapping peptides were analyzed using intracellular cytokine (IFNγ) staining. Results confirmed that strong CD8 T cell responses were generated in C57b1/6 mice to L523S peptide pool 1 but that no responses to these L523S peptides were observed in immunized B6D2F1 mice. Percentages of peptide specific IFNγ producing CD8 positive T cells in immunized C57b1/6 mice ranged from 0.17 to 2.86 (media alone controls ranged from 0.02-0.08; naïve controls for peptide pool 1 were at 0.06; irrelevant peptide controls ranged from 0.04-0.07). Chromium release assays were then carried out using spleen cells stimulated for 6 days with L523S transduced tumor cells as effector cells and peptide-pulsed target cells. Results confirmed that the CD8 T cells specific for L523S peptides present in immunized C57b1/6 mice are funtionally lytic. Again, no lytic T cell responses were detected against these L523S peptides in B6D2F1 mice.

[0984] CD4 T Cell Assays:

[0985] Direct IFNγ ELISPOT assays as described above showed that moderate responses were detected in B6D2F1 mice. CD4 T cells specific for L523S peptides within pools 3-4, corresponding to amino acids 33-75 of the L523S protein (FLVKTGYAFVDCPDESWALKAIEALSGKIELHGKPIEVEHSVP; set forth in SEQ ID NO:482) are present in L523S immunized B6D2F1 mice. No responses were detected in immunized C57b1/6 mice to these peptides. Intracellular cytokine staining confirmed that IFNγ producing CD4 T cells are present in L523S immunized B6D2F1 mice. Percentages of peptide specific IFNγ producing CD4 positive T cells in immunized B6D2F1 mice ranged from 0.29 to 0.5 (media alone controls ranged from 0.01-0.05; naïve controls for peptide pool 3/4 were at 0.03; irrelevant peptide controls ranged from 0.03-0.08). T cell proliferation and IFNγ production were detected in both C57b1/6 and B6D2F1 mice following 3 days in vitro stimulation with L523S protein or peptides as shown by standard proliferation and ELISA assays. Peptide pools showing reactivity were the same peptides that were detected by IFNγ ELISPOT and intracellular staining assays.

[0986] Anti-L523S Antibody Responses:

[0987] IgG1 and IgG2a antibody responses to L523S were examined in all groups of mice essentially as described in Example 33. B6D2F1 mice make strong anti-L523S antibody responses following L523S DNA/adenovirus immunization, with the IgG2a response being stronger than the IgG1 response. Consistent with previous results, C57B1/6 mice make little to no anti-L523S antibody response following L523S DNA/adenovirus immunization.

[0988] In summary, the results described above further validate the use of L523S DNA and adenovirus prime/boost regimen as a vaccine strategy. The mouse models described above provide systems for determining the efficacy of DNA/adenovirus L523S immunization strategies and the respective roles of CD4, CD8, and antibody responses in therapeutic and curative immunity to L523S-expressing tumors. Further, the above experiments further confirm that L523S is immungenic in vivo and thus has utility as a target for vaccine and other immunotherapeutic strategies.

### Example 38

### Isolation of a Primate Homologue of L523S

[0989] This example describes the isolation of the full-length cDNA and protein sequence of the rhesus macaque (Macaca mulatta) homologue of the L523S lung tumor antigen. The purpose of this experiment was to identify an animal model for the validation of L523S vaccine strategies.

[0990] Four pairs of PCR primers were designed to anneal to conserved regions of the L523S cDNA by comparing mouse and human L523S sequences. A rhesus monkey placenta library was generated using standard techniques and the library cDNA was used as template in a standard PCR reaction. Four overlapping amplicons that span the entire L523S cDNA were obtained and sequenced (cDNA set forth in SEQ ID NO:483; amino acid sequence set forth in SEQ ID NO:484). The L523S primate homologue has 99% sequence identity to human L523S at the cDNA and amino acid level. Thus, this experiment shows that the rhesus macaque provides an animal model in which to validate L523S vaccine strategies.

[0991] From the foregoing it will be appreciated that, although specific embodiments of the invention have been described herein for purposes of illustration, various modifications may be made without deviating from the spirit and scope of the invention. Accordingly, the invention is not limited except as by the appended claims.

What is claimed:

1. A method for stimulating an immune response in a patient, comprising administering to the patient an effective amount of a composition comprising at least one component selected from the group consisting of:
(a) a polypeptide comprising an amino acid sequence set forth in any one of SEQ ID NO:470-477, 481-482, and 484, or an immunogenic fragment thereof;
(b) a polypeptide consisting of an amino acid sequence set forth in any one of SEQ ID NO:470-477, 481-482, and 484 or an immunogenic fragment thereof; and
(c) a polypeptide comprising an amino acid sequence having at least 90% identity to a polypeptide of (a) or (b);
wherein the polypeptide contains an amino acid sequence capable of stimulating a human T-cell response.

2. The method of claim 1 wherein the composition further comprises at least one adjuvant.

3. The method of claim 2 wherein the adjuvant is selected from the group consisting of Freund's Incomplete Adjuvant; Freund's Complete Adjuvant; Merck Adjuvant 65; AS-1, AS-2; aluminum hydroxide gel; aluminum phosphate; a salt of calcium, iron or zinc; an insoluble suspension of acylated tyrosine acylated sugars; cationically or anionically derivatized polysaccharides; polyphosphazenes; biodegradable microspheres; monophosphoryl lipid A, QS21, aminoalkyl glucosaminide 4-phosphates, and quil A.

4. A method for stimulating and/or expanding T cells specific for a tumor protein, comprising contacting T cells with at least one component selected from the group consisting of:
(a) a polypeptide comprising an amino acid sequence set forth in any one of SEQ ID NO:470-477, 481-482, and 484, or an immunogenic fragment thereof;
(b) a polypeptide consisting of an amino acid sequence set forth in any one of SEQ ID NO:470-477, 481-482, and 484 or an immunogenic fragment thereof;
(c) a polypeptide comprising an amino acid sequence having at least 90% identity to a polypeptide of (a) or (b);
(d) antigen-presenting cells pulsed with or expressing a polypeptide according to (a) (b), or (c);
under conditions and for a time sufficient to permit the stimulation and/or expansion of T cells.

5. An isolated T cell population, comprising T cells prepared according to the method of claim 4.

6. A method for the treatment of lung cancer in a patient, comprising administering to the patient an effective amount of a composition comprising the proliferated T cells according to claim 5.

7. A method for stimulating an immune response in a patient, comprising administering to the patient an effective amount of a composition comprising at least one component selected from the group consisting of:
(a) a polynucleotide comprising a sequence encoding a polypeptide set forth in any one of SEQ ID NO:470-477, 481-482, and 484, or an immunogenic fragment thereof;
(b) a polynucleotide consisting of a sequence encoding a polypeptide set forth in any one of SEQ ID NO:470-477, 481-482, and 484, or an immunogenic fragment thereof; and
(c) a polynucleotide comprising a sequence encoding a polypeptide sequence having at least 90% identity to a polypeptide of (a) or (b);
wherein the polynucleotide encodes a polypeptide capable of stimulating a human T-cell response.

8. The method of claim 7 wherein the composition further comprises at least one adjuvant.

9. The method of claim 8 wherein the adjuvant is selected from the group consisting of Freund's Incomplete Adjuvant; Freund's Complete Adjuvant; Merck Adjuvant 65; AS-1, AS-2; aluminum hydroxide gel; aluminum phosphate; a salt of calcium, iron or zinc; an insoluble suspension of acylated tyrosine acylated sugars; cationically or anionically derivatized polysaccharides; polyphosphazenes; biodegradable microspheres; monophosphoryl lipid A, QS21, aminoalkyl glucosaminide 4-phosphates, and quil A.

10. A fusion protein comprising at least one polypeptide set forth in SEQ ID NO:427, 446, 449, and 470-477, 481-482, and 484.

11. An expression vector comprising a polynucleotide encoding the fusion protein of claim 10 operably linked to an expression control element.

12. A host cell transformed or transfected with an expression vector according to claim 11.

13. An isolated antibody, or antigen-binding fragment thereof, that specifically binds to a polypeptide set forth in SEQ ID NO:427, 446, 449, or 484.

14. The antibody or antigen-binding fragment thereof of claim 13 wherein said antibody or antigen-binding fragment thereof is a monoclonal antibody.

15. A diagnostic kit comprising at least one antibody according to claim 13 and a detection reagent, wherein the detection reagent comprises a reporter group.

16. A composition comprising a first component selected from the group consisting of physiologically acceptable carriers and immunostimulants, and a second component selected from the group consisting of:
(a) a polypeptide comprising an amino acid sequence set forth in any one of SEQ ID NO:470-477, 481-482, and 484;
(b) fusion proteins according to claim 10;
(c) antibodies according to claim 13;
(d) T cell populations according to claim 5 and
(e) antigen presenting cells pulsed with or expressing a polypeptide according to (a).

17. A method for stimulating an immune response in a patient, comprising administering to the patient a composition of claim 16.

18. A method for the treatment of a lung cancer in a patient, comprising administering to the patient a composition of claim 16.

19. An isolated polynucleotide comprising a sequence selected from the group consisting of:
(a) a sequence provided in SEQ ID NO:483;
(b) complements of the sequence provided in SEQ ID NO:483;
(c) sequences consisting of at least 20 contiguous residues of the sequence provided in SEQ ID NO:483;
(d) sequences that hybridize to the sequence provided in SEQ ID NO:483, under highly stringent conditions;
(e) sequences having at least 75% identity to the sequence of SEQ ID NO:483; and
(f) sequences having at least 90% identity to the sequence of SEQ ID NO:483.

20. An isolated polypeptide comprising an amino acid sequence selected from the group consisting of:
(a) sequences encoded by a polynucleotide of claim 19; and
(b) sequences having at least 70% identity to a sequence encoded by a polynucleotide of claim 19; and
(d) sequences having at least 90% identity to a sequence encoded by a polynucleotide of claim 19.
(e) an amino acid sequence provided in SEQ ID NO:484;
(f) an amino acid sequence having at least 70% identity to the sequence provided in SEQ ID NO:484; and
(g) an amino acid sequence having at least 90% identity to the sequence provided in SEQ ID NO:484.

The application's sequence listing, which the Patent Office published only in electronic form, follows.

SEQUENCE LISTING (484 sequences)

SEQ ID NO: 1 - DNA, 315 bp, Homo sapiens
  misc_feature 236, 241: n = A,T,C or G
gcagagacagactggtggttgaacctggaggtgccaaaaaagccagctgcgggcccaggacagctgccgtgagactcccgatgtcacaggcagtctgtgtggttacagcgcccctcagtgttcatctccagcagagacaacggaggaggctcccaccaggacggttctcattatttatatgttaatatgtttgtaaactcatgtacagttttttttgggggggaagcaatgggaanggtanaaattacaaatagaatcatttgctgtaatccttaaatggcaaacggtcaggccacgtgaaaaaaaaaaaaaaaa

SEQ ID NO: 2 - DNA, 380 bp, Homo sapiens
atttaggcttaagattttgtttacccttgttactaaggagcaaattagtattaaagtataatatatataaacaaatacaaaaagttttgagtggttcagcttttttattttttttaatggcataacttttaacaacactgctctgtaatgggttgaactgtggtactcagactgagataactgaaatgagtggatgtatagtgttattgcataattatcccactatgaagcaaagggactggataaattcccagtctagattattagcctttgttaaccatcaagcacctagaagaagaattattggaaattttgtcctctgtaactggcactttggggtgtgacttatcttttgcctttgtaaaaaaaaaaaaaaaaaa

SEQ ID NO: 3 - DNA, 346 bp, Homo sapiens
  misc_feature 316, 317, 318, 322, 323, 326, 329, 330, 331, 336, 337, 339,340, 342, 343: n = A,T,C or G
ttgtaagtatacaattttagaaaggattaaatgttattgatcattttactgaatactgcacatcctcaccatacaccatccactttccaataacatttaatcctttctaaaattgtaagtatacaattgtactttctttggattttcataacaaatataccatagactgttaattttattgaagtttccttaatggaatgagtcatttttgtcttgtgcttttgaggttacctttgctttgacttccaacaatttgatcatatagtgttgagctgtggaaatctttaagtttattctatagcaataatttctattnnnagannccnggnnnaaaannannannaaa

SEQ ID NO: 4 - DNA, 372 bp, Homo sapiens
  misc_feature 297, 306, 332: n = A,T,C or G
actagtctcattactccagaattatgctcttgtacctgtgtggctgggtttcttagtcgttggtttggtttggttttttgaactggtatgtagggtggttcacagttctaatgtaagcactctcttctccaagttgtgctttgtggggacaatcattctttgaacattagagaggaaggcagttcaagctgttgaaaagactattgcttatttttgtttttaaagacctacttgacgtcatgtggacagtgcacgtgccttacgctacatcttgttttctaggaagaaggggatgcngggaaggantgggtgctttgtgatggataaaacgnctaaataacacacctttacattttgaaaaaaacaaaacaa

SEQ ID NO: 5 - DNA, 698 bp, Homo sapiens
  misc_feature 8, 345, 422, 430, 433, 436, 438, 472, 481, 486, 515, 521,536, 549, 553, 556, 557, 559, 568, 593, 597, 605, 611, 613,616, 618, 620, 628, 630, 632, 634, 635, 639, 643, 647, 648,649, 652, 654, 658, 664, 690: n = A,T,C or G
actagtangatagaaacactgtgtcccgagagtaaggagagaagctactattgattagagcctaacccaggttaactgcaagaagaggcgggatactttcagctttccatgtaactgtatgcataaagccaatgtagtccagtttctaagatcatgttccaagctaactgaatcccacttcaatacacactcatgaactcctgatggaacaataacaggcccaagcctgtggtatgatgtgcacacttgctagactcagaaaaaatactactctcataaatgggtgggagtattttgggtgacaacctactttgcttggctgagtgaaggaatgatattcatatnttcatttattccatggacatttagttagtgctttttatataccaggcatgatgctgagtgacactcttgtgtatatntccaaatnttngtncngtcgctgcacatatctgaaatcctatattaagantttcccaanatgangtccctggtttttccacgccacttgatcngtcaangatctcacctctgtntgtcctaaaaccntctnctnnanggttagacnggacctctcttctcccttcccgaanaatnaagtgtgngaagananccncncncccccctncntncnncctngccngctnnnccncntgtngggggngccgcccccgcggggggacccccccnttttcccc

SEQ ID NO: 6 - DNA, 740 bp, Homo sapiens
  misc_feature 82, 406, 426, 434, 462, 536, 551, 558, 563, 567, 582, 584,592, 638, 651, 660, 664, 673, 675, 697, 706, 711, 715, 716,717, 723, 724, 725, 733: n = A,T,C or G
actagtcaaaaatgctaaaataatttgggagaaaatattttttaagtagtgttatagtttcatgtttatcttttattatgtnttgtgaagttgtgtcttttcactaattacctatactatgccaatatttccttatatctatccataacatttatactacatttgtaagagaatatgcacgtgaaacttaacactttataaggtaaaaatgaggtttccaagatttaataatctgatcaagttcttgttatttccaaatagaatggacttggtctgttaaggggctaagggagaagaagaagataaggttaaaagttgttaatgaccaaacattctaaaagaaatgcaaaaaaaaatttattttcaagccttcgaactatttaaggaaagcaaaatcatttcctanatgcatatcatttgtgagantttctcantaatatcctgaatcattcatttcagctnaggcttcatgttgactcgatatgtcatctagggaaagtctatttcatggtccaaacctgttgccatagttggtnaggctttcctttaantgtgaantattnacangaaattttctctttnanagttcttnatagggttaggggtgtgggaaaagcttctaacaatctgtagtgttncgtgttatctgtncagaaccanaatnacggatcgnangaaggactgggtctatttacangaacgaatnatctngttnnntgtgtnnncaactccngggagcc

SEQ ID NO: 7 - DNA, 670 bp, Homo sapiens
  misc_feature 265, 268, 457, 470, 485, 546, 553, 566, 590, 596, 613, 624,639, 653, 659, 661: n = A,T,C or G
gctggggagctcggcatggcggtccccgctgcagccatggggccctcggcgttgggccagagcggccccggctcgatggccccgtggtgctcagtgagcagcggcccgtcgcgctacgtgcttgggatgcaggagctgttccggggccacagcaagaccgcgagttcctggcgcacagcgccaaggtgcactcggtggcctggagttgcgacgggcgtcgcctacctcggggtcttcgacaagacgccacgtcttcttgctgganaangaccgttggtcaaagaaaacaattatcggggacatggggatagtgtggaccactttgttggcatccaagtaatcctgacctatttgttacggcgtctggagataaaaccattcgcatctgggatgtgaggactacaaaatgcattgccactgtgaacactaaaggggagaacattaatatctgctggantcctgatgggcanaccattgctgtagcnacaaggatgatgtggtgactttattgatgccaagaaaccccgttccaaagcaaaaaaacanttccaanttcgaagtcaccnaaatctcctggaacaatgaacatnaatatnttcttcctgacaatggnccttgggtgtntcacatcctcagctnccccaaaactgaancctgtncnatccacccc

SEQ ID NO: 8 - DNA, 689 bp, Homo sapiens
  misc_feature 253, 335, 410, 428, 448, 458, 466, 479, 480, 482, 483, 485,488, 491, 492, 495, 499, 500, 502, 503, 512, 516, 524, 525,526, 527, 530, 540, 546, 550, 581, 593, 594, 601, 606, 609,610, 620, 621, 622, 628, 641, 646, 656, 673: n = A,T,C or G
actagtatctaggaatgaacagtaaaagaggagcagttggctacttgattacaacagagtaaatgaagtactggatttgggaaaacctggttttattagaacatatggaatgaaagcctacacctagcattgcctacttagccccctgaattaacagagcccaattgagacaaacccctggcaacaggaaattcaagggagaaaaagtaagcaacttgggctaggatgagctgactcccttagagcaaagganagacagcccccattaccaaataccatttttgcctggggcttgtgcagctggcagtgttcctgccccagcatggcaccttatngttttgatagcaacttcgttgaattttcaccaacttattacttgaaattataatatagcctgtccgtttgctgtntccaggctgtgatatatnttcctagtggtttgactttnaaaataaatnaggtttanttttctccccccnncnntnctnccnntcnctcnncnntcccccccnctcngtcctccnnnnttngggggggccncccccncggnggacccccctttggtcccttagtggaggttnatggcccctggnnttatccnggccntanntttccccgtnnnaaatgnttccccctcccantcccnccacctcaanccggaagcctaagtttntaccctgggggtcccc

SEQ ID NO: 9 - DNA, 674 bp, Homo sapiens
  misc_feature 602, 632, 639, 668: n = A,T,C or G
gtccactctcctttgagtgtactgtcttactgtgcactctgtttttcaactttctagatataaaaaatgcttgttctatagtggagtaagagctcacacacccaaggcagcaagataactgaaaaaagcgaggcttttttgccaccttggtaaaggccagttcactgctatagaactgctataagcctgaagggaagtagctatgagactttccatttttcttagttctcccaataggctccttcatggaaaaaggcttcctgtaataattttcacctaatgaattagcagtgtgattatttctgaaataagagacaaattgggccgcagagtcttcctgtgatttaaaataaacaacccaaagttttgtttggtcttcaccaaaggacatactctagggggtatgttgttgaagacattcaaaaacattagctgttctgtctttcaatttcaagttattttggagactgcctccatgtgagttaattactttgctctggaactagcattattgtcattatcatcacattctgtcatcatcatctgaataatattgtggatttccccctctgcttgcatcttcttttgactcctctgggaanaaatgtcaaaaaaaaaggtcgatctactcngcaaggnccatctaatcactgcgctggaaggacccnctgccc

SEQ ID NO: 10 - DNA, 346 bp, Homo sapiens
  misc_feature 320, 321, 322, 325, 326, 328, 329, 330, 332, 333, 334, 335,342: n = A,T,C or G
actagtctgctgatagaaagcactatacatcctattgtttctttctttccaaaatcagccttctgtctgtaacaaaaatgtactttatagagatggaggaaaaggtctaatactacatagccttaagtgtttctgtcattgttcaagtgtattttctgtaacagaaacatatttggaatgtttttcttttccccttataaattgtaattcctgaaatactgctgctttaaaaagtcccactgtcagattatattatctaacaattgaatattgtaaatatacttgtcttacctctcaataaaagggtacttttctattannnagnngnnngnnnnataaaanaaaa

SEQ ID NO: 11 - DNA, 602 bp, Homo sapiens
actagtaaaaagcagcattgccaaataatccctaattttccactaaaaatataatgaaatgatgttaagctttttgaaaagtttaggttaaacctactgttgttagattaatgtatttgttgcttccctttatctggaatgtggcattagcttttttattttaaccctctttaattcttattcaattccatgacttaaggttggagagctaaacactgggatttttggataacagactgacagttttgcataattataatcggcattgtacatagaaaggatatggctaccttttgttaaatctgcactttctaaatatcaaaaaagggaaatgaagttataaatcaatttttgtataatctgtttgaaacatgagttttatttgcttaatattagggctttgccccttttctgtaagtctcttgggatcctgtgtagaactgttctcattaaacaccaaacagttaagtccattctctggtactagctacaaattcggtttcatattctacttaacaatttaaataaactgaaatatttctagatggtctacttctgttcatataaaaacaaaacttgatttccaaaaaaaaaaaaaaaaa

SEQ ID NO: 12 - DNA, 685 bp, Homo sapiens
  misc_feature 170, 279, 318, 321, 322, 422, 450, 453, 459, 467, 468, 470,473, 475, 482, 485, 486, 491, 498, 503, 506, 509, 522, 526,527, 528, 538, 542, 544, 551, 567, 568, 569, 574, 576, 582,587, 588, 589, 590, 592, 593, 598, 599, 603, 605, 608: n = A,T,C or G
  misc_feature 633, 634, 635, 644, 646, 648, 651, 655, 660, 662, 663, 672,674, 675, 682, 683: n = A,T,C or G
actagtcctgtgaaagtacaactgaaggcagaaagtgttaggattttgcatctaatgttcattatcatggtattgatggacctaagaaaataaaaattagactaagcccccaaataagctgcatgcatttgtaacatgattagtagatttgaatatatagatgtagtatnttgggtatctaggtgttttatcattatgtaaaggaattaaagtaaaggactttgtagttgtttttattaaatatgcatatagtagagtgcaaaaatatagcaaaaatanaaactaaaggtagaaaagcattttagatatgccttaatntannaactgtgccaggtggccctcggaatagatgccaggcagagaccagtgcctgggtggtgcctccccttgtctgcccccctgaagaacttccctcacgtgangtagtgccctcgtaggtgtcacgtggantantgggancaggccgnncngtnanaagaaancanngtganagtttcnccgtngangcngaactgtccctgngccnnnacgctcccanaacntntccaatngacaatcgagtttccnnnctccngnaacctngccgnnnncnngcccnnccantntgntaaccccgcgcccggatcgctctcnnntcgttctcncncnaangggntttcncnnccgccgtcncnnccccgcnncc

SEQ ID NO: 13 - DNA, 694 bp, Homo sapiens
  misc_feature 503, 546, 599, 611, 636, 641, 643, 645, 656, 658, 662, 676,679, 687: n = A,T,C or G
cactagtcactcattagcgttttcaatagggctcttaagtccagtagattacgggtagtcagttgacgaagatctggtttacaagaactaattaaatgtttcattgcatttttgtaagaacagaataattttataaaatgtttgtagtttataattgccgaaaataatttaaagacactttttctctgtgtgtgcaaatgtgtgtttgtgatccattttttttttttttttaggacacctgtttactagctagctttacaatatgccaaaaaaggatttctccctgaccccatccgtggttcaccctcttttccccccatgctttttgccctagtttataacaaaggaatgatgatgatttaaaaagtagttctgtatcttcagtatcttggtcttccagaaccctctggttgggaaggggatcattttttactggtcatttccctttggagtgtactactttaacagatggaaagaactcattggccatggaaacagccgangtgttgggagccagcagtgcatggcaccgtccggcatctggcntgattggtctggctgccgtcattgtcagcacagtgccatgggacatggggaanactgactgcacngccaatggttttcatgaagaatacngcatncncngtgatcacgtnanccangacgctatgggggncanagggccanttgcttc

SEQ ID NO: 14 - DNA, 679 bp, Homo sapiens
  misc_feature 29, 68, 83, 87, 94, 104, 117, 142, 145, 151, 187, 201, 211,226, 229, 239, 241, 245, 252, 255, 259, 303, 309, 359, 387,400, 441, 446, 461, 492, 504, 505, 512, 525, 527, 533, 574,592, 609, 610, 618, 620, 626, 627, 633, 639, 645, 654: n = A,T,C or G
cagccgcctgcatctgtatccagcgccangtcccgccagtcccagctgcgcgcgccccccagtcccgnacccgttcggcccangctnagttagncctcaccatnccggtcaaaggangcaccaagtgcatcaaatacctgcngtncggatntaaattcatcttctggcttgccgggattgctgtccntgccattggactanggctccgatncgactctcagaccangancatcttcgancnaganactaatnatnattnttccagcttctacacaggagtctatattctgatcggatccggcnccctcntgatgctggtgggcttcctgagctgctgcggggctgtgcaagagtcccantgcatgctgggactgttcttcggcttcntcttggtgatatncgccattgaaatacctgcggccatctggggatattccactncgatnatgtgattaaggaantccacggagttttacaaggacacgtacaacnacctgaaaaccnnggatganccccaccgggaancnctgaangccatccactatgcgttgaactgcaatggtttggctggggnccttgaacaatttaatcncatacatctggccccannaaaggacntnctcgannccttcnccgtgnaattcngttctgatnccatcacagaagtctcgaacaatcc

SEQ ID NO: 15 - DNA, 695 bp, Homo sapiens
  misc_feature 105, 172, 176, 179, 189, 203, 212, 219, 221, 229, 231, 238,242, 261, 266, 270, 278, 285, 286, 298, 311, 324, 337, 350,363, 384, 391, 395, 405, 411, 424, 427, 443, 448, 453, 455,458, 463, 467, 470, 479, 482, 484, 493, 499, 505, 518: n = A,T,C or G
  misc_feature 520, 523, 531, 540, 584, 595, 597, 609, 611, 626, 628, 651,652, 657, 661, 665, 669, 672, 681, 683, 691, 693: n = A,T,C or G
actagtggataaaggccagggatgctgctcaacctcctaccatgtacagggacgtctccccattacaactacccaatccgaagtgtcaactgtgtcaggactaanaaaccctggttttgattaaaaaagggcctgaaaaaaggggagccacaaatctgtctgcttcctcacnttantcnttggcaaatnagcattctgtctcnttggctgcngcctcancncaaaaaancngaactcnatcnggcccaggaatacatctcncaatnaacnaaattgancaaggcnntgggaaatgccngatgggattatcntccgcttgttgancttctaagtttcnttcccttcattcnaccctgccagccnagttctgttagaaaaatgccngaattcnaacnccggttttcntactcngaatttagatctncanaaacttcctggccacnattcnaattnanggncacgnacanatnccttccatnaancncaccccacntttganagccangacaatgactgcntnaantgaaggcntgaaggaanaactttgaaaggaaaaaaaactttgtttccggccccttccaacncttctgtgttnancactgccttctngnaaccctggaagcccngngacagtgttacatgttgttctannaaacngacncttnaatntcnatcttcccnanaacgattncncc

SEQ ID NO: 16 - DNA, 669 bp, Homo sapiens
  misc_feature 299, 354, 483, 555, 571, 573, 577, 642, 651, 662, 667: n = A,T,C or G
cgccgaagcagcagcgcaggttgtccccgtttcccctcccccttcccttctccggttgccttcccgggccccttacactccacagtcccggtcccgccatgtcccagaaacaagaagaagagaaccctgcggaggagaccggcgaggagaagcaggacacgcaggagaaagaaggtattctgcctgagagagctgaagaggcaaagctaaaggccaaatacccaagcctaggacaaaagcctggaggctccgacttcctcatgaagagactccagaaagggcaaaagtactttgactcnggagactacaacatggccaaagccaacatgaagaataagcagctgccaagtgcangaccagacaagaacctggtgactggtgatcacatccccaccccacaggatctgcccagagaaagtcctcgctcgtcaccagcaagcttgcgggtggccaagttgaatgatgctgccggggctctgccanatctgagacgcttccctccctgccccacccgggtcctgtgctggctcctgcccttcctgcttttgcagccangggtcaggaagtggcncnggtngtggctggaaagcaaaaccctttcctgttggtgtcccacccatggagcccctggggcgagcccangaacttgancctttttgttntcttncc

SEQ ID NO: 17 - DNA, 697 bp, Homo sapiens
  misc_feature 33, 48, 50, 55, 59, 60, 76, 77, 78, 90, 113, 118, 130, 135,141, 143, 150, 156, 166, 167, 170, 172, 180, 181, 190, 192,194, 199, 201, 209, 212, 224, 225, 226, 230, 233, 234, 236,242, 244, 251, 253, 256, 268, 297, 305, 308, 311, 314: n = A,T,C or G
  misc_feature 315, 317, 322, 324, 327, 333, 337, 343, 362, 364, 367, 368,373, 384, 388, 394, 406, 411, 413, 423, 429, 438, 449, 450,473, 476, 479, 489, 491, 494, 499, 505, 507, 508, 522, 523,527, 530, 533, 535, 538, 539, 545, 548, 550, 552, 555: n = A,T,C or G
  misc_feature 562, 563, 566, 568, 572, 577, 578, 580, 581, 591, 594, 622,628, 632, 638, 642, 644, 653, 658, 662, 663, 665, 669, 675,680, 686, 689: n = A,T,C or G
gcaagatatggacaactaagtgagaaggtaatnctctactgctctagntnctccnggcnngacgcgctgaggagannnacgctggcccanctgccggccacacacggggatcntggtnatgcctgcccanggganccccancnctcggancccatntcacacccgnnccntncgcccacnncctggctcncncngcccngnccagctcncgnccccctccgccnnnctcnttnncntctccncnccctccncnacnacctcctacccncggctccctccccagcccccccccgcaancctccacnacnccntcnncncgaancnccnctcgcnctcngccccngccccctgccccccgcccncnacnncgcgntcccccgcgcncgcngcctcnccccctcccacnacagncncacccgcagncacgcnctccgcccnctgacgccccnncccgccgcgctcaccttcatggnccnacngccccgctcncnccnctgcncgccgncnnggcgccccgccccnnccgngtnccncncgnngccccngcngnangcngtgcgcnncangnccgngccgnncnncaccctccgnccnccgccccgcccgctgggggctcccgccncgcggntcantccccncccntncgcccactntccgntccnncnctcncgctcngcgcncgcccnccncccccccc

SEQ ID NO: 18 - DNA, 670 bp, Homo sapiens
  misc_feature 234, 292, 329, 437, 458, 478, 487, 524, 542, 549, 550, 557,576, 597, 603, 604, 646, 665: n = A,T,C or G
ctcgtgtgaagggtgcagtacctaagccggagcggggtagaggcgggccggcacccccttctgacctccagtgccgccggcctcaagatcagacatggcccagaacttgaacgacttggcgggacggctgcccgccgggccccggggcatgggcacggccctgaagctgttgctgggggccggcgccgtggcctacggtgtgcgcgaatctgtgttcaccgtggaaggcgggcncagagccatcttcttcaatcggatcggtggagtgcacaggacactatcctgggccganggccttcacttcaggatccttggttccagtaccccancatctatgacattcgggccagacctcgaaaaaatctcctccctacaggctccaaagacctacagatggtgaatatctccctgcgagtgttgtctcgaccaatgctcangaacttcctaacatgttccancgcctaagggctggactacnaagaacgantgttgccgtccattgtcacgaagtgctcaagaatttnggtggccaagttcaatgncctcacnnctgatcncccagcggggccaagttanccctggttgatccccgggganctgacnnaaaagggccaaggacttcccctcatcctggataatgtggccntcacaaagctcaactttanccacc

SEQ ID NO: 19 - DNA, 606 bp, Homo sapiens
  misc_feature 506: n = A,T,C or G
actagtgccaacctcagctcccaggccagttctctgaatgtcgaggagttccaggatctctggcctcagttgtccttggttattgatgggggacaaattggggatggccagagccccgagtgtcgccttggctcaactgtggttgatttgtctgtgcccggaaagtttggcatcattcgtccaggctgtgccctggaaagtactacagccatcctccaacagaagtacggactgctcccctcacatgcgtcctacctgtgaaactctgggaagcaggaaggcccaagacctggtgctggatactatgtgtctgtccactgacgactgtcaaggcctcatttgcagaggccaccggagctagggcactagcctgacttttaaggcagtgtgtctttctgagcactgtagaccaagcccttggagctgctggtttagccttgcacctggggaaaggatgtatttatttgtattttcatatatcagccaaaagctgaatggaaaagttnagaacattcctaggtggccttattctaataagtttcttctgtctgttttgtttttcaattgaaaagttattaaataacagatttagaatctagtgagacc

SEQ ID NO: 20 - DNA, 449 bp, Homo sapiens
actagtaaacaacagcagcagaaacatcagtatcagcagcgtcgccagcaggagaatatgcagcgccagagccgaggagaacccccgctccctgaggaggacctgtccaaactcttcaaaccaccacagccgcctgccaggatggactcgctgctcattgcaggccagataaacacttactgccagaacatcaaggagttcactgcccaaaacttaggcaagctcttcatggcccaggctcttcaagaatacaacaactaagaaaaggaagtttccagaaaagaagttaacatgaactcttgaagtcacaccagggcaactcttggaagaaatatatttgcatattgaaaagcacagaggatttctttagtgtcattgccgattttggctataacagtgtctttctagccataataaaataaaacaaaatcttgactgcttgctcaaaa

SEQ ID NO: 21 - DNA, 409 bp, Homo sapiens
tatcaatcaactggtgaataattaaacaatgtgtggtgtgatcatacaaagggtaccactcaatgataaaaggaacaagctgcctatatgtggaacaacatggatgcatttcagaaactttatgttgagtgaaagaacaaacacggagaacatactatgtggttctctttatgtaacattacagaaataaaaacagaggcaaccacctttgaggcagtatggagtgagatagactggaaaaaggaaggaaggaaactctacgctgatggaaatgtctgtgtcttcattgggtggtagttatgtggggatatacatttgtcaaaatttattgaactatatactaaagaactctgcattttattgggatgtaaataatacctcaattaaaaagacaaaaaaaaaaaaaaaa

SEQ ID NO: 22 - DNA, 649 bp, Homo sapiens
  misc_feature 263, 353, 610, 635, 646: n = A,T,C or G
acaattttcattatcttaagcacattgtacatttctacagaacctgtgattattctcgcatgataaggatggtacttgcatatggtgaattactactgttgacagtttccgcagaaatcctatttcagtggaccaacattgtggcatggcagcaaatgccaacattttgtggaatagcagcaaatctacaagagaccctggttggtttttcgttttgttttctttgttttttcccccttctcctgaatcagcagggatggaangagggtagggaagttatgaattactccttccagtagtagctctgaagtgtcacatttaatatcagttttttttaaacatgattctagttnaatgtagaagagagaagaaagaggaagtgttcacttttttaatacactgatttagaaatttgatgtcttatatcagtagttctgaggtattgatagcttgctttatttctgcctttacgttgacagtgttgaagcagggtgaataactaggggcatatatattttttttttttgtaagctgtttcatgatgttttctttggaatttccggataagttcaggaaaacatctgcatgttgttatctagtctgaagttcntatccatctcattacaacaaaaacncccagaacggnttg

SEQ ID NO: 23 - DNA, 669 bp, Homo sapiens
  misc_feature 642, 661: n = A,T,C or G
actagtgccgtactggctgaaatccctgcaggaccaggaagagaaccagttcagactttgtactctcagtcaccagctctggaattagataaattccttgaagatgtcaggaatgggatctatcctctgacagcctttgggctgcctcggccccagcagccacagcaggaggaggtgacatcacctgtcgtgcccccctctgtcaagactccgacacctgaaccagctgaggtggagactcgcaaggtggtgctgatgcagtgcaacattgagtcggtggaggagggagtcaaacaccacctgacacttctgctgaagttggaggacaaactgaaccggcacctgagctgtgacctgatgccaaatgagaatatccccgagttggcggctgagctggtgcagctgggcttcattagtgaggctgaccagagccggttgacttctctgctagaagagacttgaacaagttcaattttgccaggaacagtaccctcaactcagccgctgtcaccgtctcctcttagagctcactcgggccaggccctgatctgcgctgtggctgtcctggacgtgctgcaccctctgtccttccccccagtcagtattacctgtgaagcccttccctcctttattattcagganggctgggggggctccttgnttctaacc

SEQ ID NO: 24 - DNA, 442 bp, Homo sapiens
actagtaccatcttgacagaggatacatgctcccaaaacgtttgttaccacacttaaaaatcactgccatcattaagcatcagtttcaaaattatagccattcatgatttactttttccagatgactatcattattctagtcctttgaatttgtaaggggaaaaaaaacaaaaacaaaaacttacgatgcacttttctccagcacatcagatttcaaattgaaaattaaagacatgctatggtaatgcacttgctagtactacacactttggtacaacaaaaaacagaggcaagaaacaacggaaagagaaaagccttcctttgttggcccttaaactgagtcaagatctgaaatgtagagatgatctctgacgatacctgtatgttcttattgtgtaaataaaattgctggtatgaaatgacctaaaaaaaaaaaaagaaa

SEQ ID NO: 25 - DNA, 656 bp, Homo sapiens
  misc_feature 330, 342, 418, 548, 579, 608: n = A,T,C or G
tgcaagtaccacacactgtttgaattttgcacaaaaagtgactgtaggatcaggtgatagccccggaatgtacagtgtcttggtgcaccaagatgccttctaaaggctgacataccttggaccctaatggggcagagagtatagccctagcccagtggtgacatgaccactccctttgggaggcctgaggtagaggggagtggtatgtgttttctcagtggaagcagcacatgagtgggtgacaggatgttagataaaggctctagttagggtgtcattgtcatttgagagactgacacactcctagcagctggtaaaggggtgctggangccatggagganctctagaaacattagcatgggctgatctgattacttcctggcatcccgctcacttttatgggaagtcttattaganggatgggacagttttccatatccttgctgtggagctctggaacactctctaaatttccctctattaaaaatcactgccctaactacacttcctccttgaaggaatagaaatggaactttctctgacatanttcttggcatggggagccagccacaaatganaatctgaacgtgtccaggtttctcctganactcatctacatagaattggttaaaccctcccttggaataaggaaaaa

SEQ ID NO: 26 - DNA, 434 bp, Homo sapiens
  misc_feature 395: n = A,T,C or G
actagttcagactgccacgccaaccccagaaaataccccacatgccagaaaagtgaagtcctaggtgtttccatctatgtttcaatctgtccatctaccaggcctcgcgataaaaacaaaacaaaaaaacgctgccaggttttagaagcagttctggtctcaaaaccatcaggatcctgccaccagggttcttttgaaatagtaccacatgtaaaagggaatttggctttcacttcatctaataactgaattgtcaggctttgattgataattgtagaaataagtagccttctgttgtgggaataagttataatcagtattcatctctttgttttttgtcactcttttctctctaattgtgtcatttgtactgtttgaaaaatatttcttctatnaaattaaactaacctgccttaaaaaaaaaaaaaaaaaaa

SEQ ID NO: 27 - DNA, 654 bp, Homo sapiens
  misc_feature 505, 533, 563, 592, 613, 635, 638: n = A,T,C or G
actagtccaacacagtcagaaacattgttttgaatcctctgtaaaccaaggcattaatcttaataaaccaggatccatttaggtaccacttgatataaaaaggatatccataatgaatattttatactgcatcctttacattagccactaaatacgttattgcttgatgaagacctttcacagaatcctatggattgcagcatttcacttggctacttcatacccatgccttaaagaggggcagtttctcaaaagcagaaacatgccgccagttctcaagttttcctcctaactccatttgaatgtaagggcagctggcccccaatgtggggaggtccgaacattttctgaattcccattttcttgttcgcggctaaatgacagtttctgtcattacttagattccgatctttcccaaaggtgttgatttacaaagaggccagctaatagcagaaatcatgaccctgaaagagagatgaaattcaagctgtgagccaggcagganctcagtatggcaaaggtcttgagaatcngccatttggtacaaaaaaaattttaaagcntttatgttataccatggaaccatagaaanggcaagggaattgttaagaanaattttaagtgtccagacccanaangaaaaaaaaaaaaaaa

SEQ ID NO: 28 - DNA, 670 bp, Homo sapiens
  misc_feature 101, 226, 274, 330, 385, 392, 397, 402, 452, 473, 476, 532,534, 538, 550, 583, 595, 604, 613, 622, 643, 669: n = A,T,C or G
cgtgtgcacatactgggaggatttccacagctgcacggtcacagcccttacggattgccaggaaggggcgaaagatatgtgggataaactgagaaaagaanccaaaaacctcaacatccaaggcagcttattcgaactctgcggcagcggcaacggggcggcggggtccctgctcccggcgttcccggtgctcctggtgtctctctcggcagctttagcgacctgnctttccttctgagcgtggggccagctccccccgcggcgcccacccacnctcactccatgctcccggaaatcgagaggaagatcattagttctttggggacgttngtgattctctgtgatgctgaaaaacactcatatagggaatgtgggaaatcctganctctttnttatntcgtntgatttcttgtgttttatttgccaaaatgttaccaatcagtgaccaaccnagcacagccaaaaatcggacntcngctttagtccgtcttcacacacagaataagaaaacggcaaacccaccccacttttnantttnattattactaanttttttctgttgggcaaaagaatctcaggaacngccctggggccnccgtactanagttaaccnagctagttncatgaaaaatgatgggctccncctcaatgggaaagccaagaaaaagnc

SEQ ID NO: 29 - DNA, 551 bp, Homo sapiens
  misc_feature 336, 474, 504, 511, 522, 523, 524, 540, 547: n = A,T,C or G
actagtcctccacagcctgtgaatccccctagacctttcaagcatagtgagcggagaagaagatctcagcgtttagccaccttacccatgcctgatgattctgtagaaaaggtttcttctccctctccagccactgatgggaaagtattctccatcagttctcaaaatcagcaagaatcttcagtaccagaggtgcctgatgttgcacatttgccacttgagaagctgggaccctgtctccctcttgacttaagtcgtggttcagaagttacagcaccggtagcctcagattcctcttaccgtaatgaatgtcccagggcagaaaaagaggatacncagatgcttccaaatccttcttccaaagcaatagctgatgggaagaggagctccagcagcagcaggaatatcgaaaacagaaaaaaaagtgaaattgggaagacaaaagctcaacagcatttggtaaggagaaaaganaagatgaggaaggaagagagaagagagacnaagatcnctacggaccgnnncggaagaagaagaagnaaaaaanaaaa

SEQ ID NO: 30 - DNA, 684 bp, Homo sapiens
  misc_feature 545, 570, 606, 657, 684: n = A,T,C or G
actagttctatctggaaaaagcccgggttggaagaagctgtggagagtgcgtgtgcaatgcgagactcatttcttggaagcatccctggcaaaaatgcagctgagtacaaggttatcactgtgatagaacctggactgctttttgagataatagagatgctgcagtctgaagagacttccagcacctctcagttgaatgaattaatgatggcttctgagtcaactttactggctcaggaaccacgagagatgactgcagatgtaatcgagcttaaagggaaattcctcatcaacttagaaggtggtgatattcgtgaagagtcttcctataaagtaattgtcatgccgactacgaaagaaaaatgcccccgttgttggaagtatacagcgggagtcttcagatacactgtgtcctcgatgtgcagaagttgtcagtgggaaaatagtattaacagctcactcgagcaagaaccctcctgacagtactgggctagaagtttggatggattatttacaatataggaaagaaagccaagaattaggtnatgagtggatgagtaaatggtggangatggggaattcaaatcagaattatggaagaagttnttcctgttactatagaaaggaattatgtttatttacatgcagaaaatatanatgtgtggtgtgtaccgtggatggaan

SEQ ID NO: 31 - DNA, 654 bp, Homo sapiens
  misc_feature 326, 582, 651: n = A,T,C or G
gcgcagaaaaggaaccaatatttcagaaacaagcttaataggaacagctgcctgtacatcaacatcttctcagaatgacccagaagttatcatcgtgggagctggcgtgcttggctctgctttggcagctgtgctttccagagatggaagaaaggtgacagtcattgagagagacttaaaagagcctgacagaatagttggagaattcctgcagccgggtggttatcatgttctcaaagaccttggtcttggagatacagtggaaggtcttgatgcccaggttgtaaatggttacatgattcatgatcagggaaagcaaatcagangttcagattccttaccctctgtcagaaaacaatcaagtgcagagtggaagagctttccatcacggaagattcatcatgagtctccggaaagcagctatggcagagcccaatgcaaagtttattgaaggtgttgtgttacagttattagaggaagatgatgttgtgatgggagttcagtacaaggataaagagactgggagatatcaaggaactccatgctccactgactgttgttgcagatgggcttttctccaanttcaggaaaagcctggtctcaataaagtttctgtatcactcatttggttggcttcttatgaagaatgcnccc

SEQ ID NO: 32 - DNA, 673 bp, Homo sapiens
  misc_feature 376, 545, 627: n = A,T,C or G
actagtgaagaaaaagaaattctgatacgggacaaaaatgctcttcaaaacatcattctttatcacctgacaccaggagttttcattggaaaaggatttgaacctggtgttactaacattttaaagaccacacaaggaagcaaaatctttctgaaagaagtaaatgatacacttctggtgaatgaattgaaatcaaaagaatctgacatcatgacaacaaatggtgtaattcatgttgtagataaactcctctatccagcagacacacctgttggaaatgatcaactgctggaaatacttaataaattaatcaaatacatccaaattaagtttgttcgtggtagcaccttcaaagaaatccccgtgactgtctatnagccaattattaaaaaatacaccaaaatcattgatgggagtgcctgtgggaaataactgaaaaagagaccgagaagaacgaatcattacaggtcctgaaataaaatacctaggatttctactggaggtggagaaacagaagaactctgaagaaattgttacaagaagangtcccaaggtcaccaaattcattgaaggtggtgatggtctttatttgaagatgaagaaattaaaagacgcttcagggagacnccccatgaaggaattgccagccacaaaaaaattcagggattagaaa

SEQ ID NO: 33 - DNA, 673 bp, Homo sapiens
  misc_feature 325, 419, 452, 532, 538, 542, 571, 600, 616, 651, 653, 672: n = A,T,C or G
actagttatttactttcctccgcttcagaaggtttttcagactgagagcctaagcatactggatctgttgtttcttttgggtctcacctcatcagtgtgcatagtggcagaaattataaagaaggttgaaaggagcagggaaaagatccagaagcatgttagttcgacatcatcatcttttcttgaagtatgatgcatattgcattattttatttgcaaactaggaattgcagtctgaggatcatttagaagggcaagttcaagaggatatgaagatttgagaactttttaactattcattgactaaaaatgaacattaatgttnaagacttaagactttaacctgctggcagtcccaaatgaaattatgcaactttgatatcatattccttgatttaaattgggcttttgtgattgantgaaactttataaagcatatggtcagttatttnattaaaaaggcaaaacctgaaccaccttctgcacttaaagaagtctaacagtacaaatacctatctatcttagatggatntatttntttntatttttaaatattgtactatttatggtnggtggggctttcttactaatacacaaatnaatttatcatttcaanggcattctatttgggtttagaagttgattccaagnantgcatatttcgctactgtnt

SEQ ID NO: 34 - DNA, 684 bp, Homo sapiens
  misc_feature 414, 472, 480, 490, 503, 507, 508, 513, 523, 574, 575, 598,659, 662, 675: n = A,T,C or G
actagtttattcaagaaaagaacttactgattcctctgttcctaaagcaagagtggcaggtgatcagggctggtgtagcatccggttcctttagtgcagctaactgcatttgtcactgatgaccaaggaggaaatcactaagacatttgagaagcagtggtatgaacgttcttggacaagccacagttctgagccttaaccctgtagtttgcacacaagaacgagctccacctccccttcttcaggaggaatctgtgcggatagattggctggacttttcaatggttctgggttgcaagtgggcactgttatggctgggtatggagcggacagccccaggaatcagagcctcagcccggctgcctggttggaaggtacaggtgttcagcaccttcggaaaaagggcataaagtngtgggggacaattctcagtccaagaagaatgcattgaccattgctggctatttgcttncctagtangaattggatncatttttgaccangatnnttctnctatgctttnttgcaatgaaatcaaatcccgcattatctacaagtggtatgaagtcctgcnncccccagagaggctgttcaggcnatgtcttccaagggcagggtgggttacaccattttacctcccctctccccccagattatgnacncagaaggaatttntttcctccc

SEQ ID NO: 35 - DNA, 614 bp, Homo sapiens
  misc_feature 17, 20, 152, 223, 267, 287, 304, 306, 316, 319, 321, 355,365, 382, 391, 407, 419, 428, 434, 464, 467, 477, 480, 495,499, 505, 515, 516, 522, 524, 527, 542, 547, 549, 567, 572,576, 578: n = A,T,C or G
actagtccaacgcgttngcnaatattcccctggtagcctacttccttacccccgaatattggtaagatcgagcaatggcttcaggacatgggttctcttctcctgtgatcattcaagtgctcactgcatgaagactggcttgtctcagtgtntcaacctcaccagggctgtctcttggtccacacctcgctccctgttagtgccgtatgacagcccccatcanatgaccttggccaagtcacggtttctctgtggtcaatgttggtnggctgattggtggaaagtanggtggaccaaaggaagncncgtgagcagncancnccagttctgcaccagcagcgcctccgtcctactngggtgttccngtttctcctggccctgngtgggctanggcctgattcgggaanatgcctttgcanggaagggangataantgggatctaccaattgattctggcaaaacnatntctaagattnttntgctttatgtggganacanatctanctctcatttnntgctgnanatnacaccctactcgtgntcgancncgtcttcgattttcgganacacnccantnaatactggcgttctgttgttaaaaaaaaaaaaaaaa

SEQ ID NO: 36 - DNA, 686 bp, Homo sapiens
  misc_feature 222, 224, 237, 264, 285, 548, 551, 628, 643, 645, 665, 674: n = A,T,C or G
gtggctggcccggttctccgcttctccccatcccctactttcctccctccctccctttccctccctcgtcgactgttgcttgctggtcgcagactccctgacccctccctcacccctccctaacctcggtgccaccggattgcccttcttttcctgttgcccagcccagccctagtgtcagggcgggggcctggagcagcccgaggcactgcagcagaagananaaaagacacgacnaacctcagctcgccagtccggtcgctngcttcccgccgcatggcaatnagacagacgccgctcacctgctctgggcacacgcgacccgtggttgatttggccttcagtggcatcacccttatgggtatttcttaatcagcgcttgcaaagatggttaacctatgctacgccagggagatacaggagactggattggaacatttttggggtctaaaggtctgtttggggtgcaacactgaataaggatgccaccaaagcagctacagcagctgcagatttcacagcccaagtgtgggatgctgtctcagganatnaattgataacctggctcataacacattgtcaagaatgtggatttccccaggatattattatttgtttaccggggganaggataactgtttcncntattttaattgaacaaactnaaacaaaanctaaggaaatcc

SEQ ID NO: 37 - DNA, 681 bp, Homo sapiens
  misc_feature 7, 10, 11, 19, 25, 32, 46, 53, 77, 93, 101, 103, 109, 115,123, 128, 139, 157, 175, 180, 192, 193, 194, 212, 218, 226,227, 233, 240, 241, 259, 260, 267, 289, 296, 297, 298, 312,313, 314, 320, 325, 330, 337, 345, 346, 352, 353, 356: n = A,T,C or G
  misc_feature 382, 385, 400, 427, 481, 484, 485, 491, 505, 515, 533, 542,544, 554, 557, 560, 561, 564, 575, 583, 589, 595, 607, 619,628, 634, 641, 645, 658, 670: n = A,T,C or G
gagacanacnnaacgtcangagaanaaaagangcatggaacacaanccaggcncgatggccaccttcccaccagcanccagcgccccccagcngcccccangnccggangaccangactccancctgnatcaatctganctctattcctggcccatncctacctcggaggtggangccgnaaaggtcgcacnnncagagaagctgctgccancaccanccgccccnnccctgncgggctnnataggaaactggtgaccnngctgcanaattcatacaggagcacgcgangggcacnnnctcacactgagttnnngatgangcctnaccanggacctnccccagcnnattgannacnggactgcggaggaaggaagaccccgnacnggatcctggccggcntgccacccccccacccctaggattatnccccttgactgagtctctgaggggctacccgaacccgcctccattccctaccanatnntgctcnatcgggactgacangctggggatnggaggggctatcccccancatcccctnanaccaacagcnacngannatnggggctccccngggtcggngcaacnctcctncaccccggcgcnggccttcggtgntgtcctccntcaacnaattccnaaanggcgggccccccngtggactcctcnttgttccctcc

SEQ ID NO: 38 - DNA, 687 bp, Homo sapiens
  misc_feature 3, 30, 132, 151, 203, 226, 228, 233, 252, 264, 279, 306,308, 320, 340, 347, 380, 407, 429, 437, 440, 445, 448, 491,559, 567, 586, 589, 593, 596, 603, 605, 606, 609, 626, 639,655, 674, 682: n = A,T,C or G
canaaaaaaaaaaacatggccgaaaccagnaagctgcgcgatggcgccacggcccctcttctcccggcctgtgtccggaaggtttccctccgaggcgccccggctcccgcaagcggaggagagggcgggacntgccggggccggagctcanaggccctggggccgctctgctctcccgccatcgcaagggcggcgctaacctnaggcctccccgcaaaggtccccnangcggnggcggcggggggctgtganaaccgcaaaaanaacgctgggcgcgcngcgaacccgtccacccccgcgaaggananacttccacagangcagcgtttccacagcccanagccacntttctagggtgatgcaccccagtaagttcctgncggggaagctcaccgctgtcaaaaaanctcttcgctccaccggcgcacnaagggganganggcangangctgccgcccgcacaggtcatctgatcacgtcgcccgccctantctgcttttgtgaatctccactttgttcaaccccacccgccgttctctcctccttgcgccttcctctnaccttaanaaccagcttcctctacccnatngtanttnctctgcncnngtngaaattaattcggtccnccggaacctcttncctgtggcaactgctnaaagaaactgctgttctgnttactgcngtccc

SEQ ID NO: 39 - DNA, 695 bp, Homo sapiens
  misc_feature 300, 401, 423, 429, 431, 437, 443, 448, 454, 466, 492, 515,523, 524, 536, 538, 541, 552, 561, 566, 581, 583, 619, 635,636, 641, 649, 661, 694: n = A,T,C or G
actagtctggcctacaatagtgtgattcatgtaggacttctttcatcaattcaaaacccctagaaaaacgtatacagattatataagtagggataagatttctaacatttctgggctctctgacccctgcgctagactgtggaaagggagtattattatagtatacaacactgctgttgccttattagttataacatgataggtgctgaattgtgattcacaatttaaaaacactgtaatccaaacttttttttttaactgtagatcatgcatgtgaatgttaatgttaatttgttcaangttgttatgggtagaaaaaaccacatgccttaaaattttaaaaagcagggcccaaacttattagtttaaaattaggggtatgtttccagtttgttattaantggttatagctctgtttagaanaaatcnangaacangatttngaaanttaagntgacattatttnccagtgacttgttaatttgaaatcanacacggcaccttccgttttggtnctattggnntttgaatccaancnggntccaaatcttnttggaaacngtccntttaacttttttacnanatcttatttttttattttggaatggccctatttaangttaaaaggggggggnnccacnaccattcntgaataaaactnaatatatatccttggtcccccaaaatttaaggng

SEQ ID NO: 40 - DNA, 674 bp, Homo sapiens
  misc_feature 403, 428, 432, 507, 530, 543, 580, 583, 591, 604, 608, 621,624, 626, 639, 672: n = A,T,C or G
actagtagtcagttgggagtggttgctataccttgacttcatttatatgaatttccactttattaaataatagaaaagaaaatcccggtgcttgcagtagagttataggacattctatgcttacagaaaatatagccatgattgaaatcaaatagtaaaggctgttctggctttttatcttcttagctcatcttaaataagtagtacacttgggatgcagtgcgtctgaagtgctaatcagttgtaacaatagcacaaatcgaacttaggatgtgtttcttctcttctgtgtttcgattttgatcaattctttaattttgggaacctataatacagttttcctattcttggagataaaaattaaatggatcactgatatttaagtcattctgcttctcatctnaatattccatattctgtattagganaaantacctcccagcacagccccctctcaaaccccacccaaaaccaagcatttggaatgagtctcctttatttccgaantgtggatggtataacccatatcnctccaatttctgnttgggttgggtattaatttgaactgtgcatgaaaagnggnaatctttnctttgggtcaaantttnccggttaatttgnctngncaaatccaatttnctttaagggtgtctttataaaatttgctattcngg

SEQ ID NO: 41 - DNA, 657 bp, Homo sapiens
  misc_feature 243, 247, 251, 261, 267, 272, 298, 312, 315, 421, 432, 434,501, 524, 569, 594, 607, 650: n = A,T,C or G
gaaacatgcaagtaccacacactgtttgaattttgcacaaaaagtgactgtagggatcaggtgatagccccggaatgtacagtgtcttggtgcaccaagatgccttctaaaggctgacataccttgggaccctaatggggcagagagtatagccctagcccagtggtgacatgaccactccctttgggaggctgaagttaaagggaatggtatgtgttttctcatggaagcagcacatgaatnggtnacangatgttaaantaaggntctantttgggtgtcttgtcatttgaaaaantgacacactcctancanctggtaaaggggtgctggaagccatggaagaactctaaaaacattagcatgggctgatctgattacttcctggcatcccgctcacttttatgggaagtcttattanaaggatgggananttttccatatccttgctgttggaactctggaacactctctaaatttccctctattaaaaatcactgnccttactacacttcctccttganggaatagaaatggacctttctctgacttagttcttggcatggganccagcccaaattaaaatctgacttntccggtttctccngaactcacctacttgaattggtaaaacctcctttggaattagnaaaaacc

SEQ ID NO: 42 - DNA, 389 bp, Homo sapiens
  misc_feature 179, 317, 320: n = A,T,C or G
actagtgctgaggaatgtaaacaagtttgctgggccttgcgagacttcaccaggttgtttcgatagctcacactcctgcactgtgcctgtcacccaggaatgtcttttttaattagaagacaggaagaaaacaaaaaccagactgtgtcccacaatcagaaacctccgttgtggcagangggccttcaccgccaccagggtgtcccgccagacagggagagactccagccttctgaggccatcctgaagaattcctgtttgggggttgtgaaggaaaatcacccggatttaaaaagatgctgttgcctgcccgcgtngtngggaagggactggtttcctggtgaatttcttaaaagaaaaatattttaagttaagaaaaaaaaaaaaaa

SEQ ID NO: 43 - DNA, 279 bp, Homo sapiens
actagtgacaagctcctggtcttgagatgtcttctcgttaaggagatgggccttttggaggtaaaggataaaatgaatgagttctgtcatgattcactattctagaacttgcatgacctttactgtgttagctctttgaatgttcttgaaattttagactttctttgtaaacaaataatatgtccttatcattgtataaaagctgttatgtgcaacagtgtggagatccttgtctgatttaataaaatacttaaacactgaaaaaaaaaaaaaaaaaaa

SEQ ID NO: 44 - DNA, 449 bp, Homo sapiens
  misc_feature 245, 256, 264, 266, 273, 281, 323, 325, 337, 393: n = A,T,C or G
actagtagcatcttttctacaacgttaaaattgcagaagtagcttatcattaaaaaacaacaacaacaacaataacaataaatcctaagtgtaaatcagttattctaccccctaccaaggatatcagcctgttttttcccttttttctcctgggaataattgtgggcttcttcccaaatttctacagcctctttcctcttctcatgcttgagcttccctgtttgcacgcatgcgttgtgcaagantgggctgtttngcttggantncggtccnagtggaancatgctttcccttgttactgttggaagaaactcaaaccttcnanccctaggtgttnccattttgtcaagtcatcactgtatttttgtactggcattaacaaaaaaagaaatnaaatattgttccattaaactttaataaaactttaaaagggaaaaaaaaaaaaaaaa

SEQ ID NO: 45 - DNA, 559 bp, Homo sapiens
  misc_feature 263: n = A,T,C or G
actagtgtgggggaatcacggacacttaaagtcaatctgcgaaataattcttttattacacactcactgaagtttttgagtcccagagagccattctatgtcaaacattccaagtactctttgagagcccagcattacatcaacatgcccgtgcagttcaaaccgaagtccgcaggcaaatttgaagctttgcttgtcattcaaacagatgaaggcaagagtattgctattcgactaattggtgaagctcttggaaaaaattnactagaatactttttgtgttaagttaattacataagttgtattttgttaactttatctttctacactacaattatgcttttgtatatatattttgtatgatggatatctataattgtagattttgtttttacaagctaatactgaagactcgactgaaatattatgtatctagcccatagtattgtacttaacttttacagggtgaaaaaaaaattctgtgtttgcattgattatgatattctgaataaatatgggaatatattttaatgtgggtaaaaaaaaaaaaaaaaaggaa

SEQ ID NO: 46 - DNA, 731 bp, Homo sapiens
  misc_feature 270, 467, 477, 502, 635, 660, 671, 688, 695, 697, 725: n = A,T,C or G
actagttctagtaccatggctgtcatagatgcaaccattatattccatttagtttcttcctcaggttccctaacaattgtttgaaactgaatatatatgtttatgtatgtgtgtgtgttcactgtcatgtatatggtgtatatgggatgtgtgcagttttcagttatatatatattcatatatacatatgcatatatatgtataatatacatatatacatgcatacacttgtataatatacatatatatacacatatatgcacacatatnatcactgagttccaaagtgagtctttatttggggcaattgtattctctccctctgtctgctcactgggcctttgcaagacatagcaattgcttgatttcctttggataagagtcttatcttcggcactcttgactctagccttaactttagatttctattccagaatacctctcatatctatcttaaaacctaagangggtaaagangtcataagattgtagtatgaaagantttgcttagttaaattatatctcaggaaactcattcatctacaaattaaattgtaaaatgatggtttgttgtatctgaaaaaatgtttagaacaagaaatgtaactgggtacctgttatatcaaagaacctcnatttattaagtctcctcatagccanatccttatatngccctctctgacctganttaatananacttgaataatgaatagttaatttaggnttgggc

SEQ ID NO: 47 - DNA, 640 bp, Homo sapiens
  misc_feature 5, 28, 106, 153, 158, 173, 176, 182, 189, 205, 210, 214,225, 226, 229, 237, 260, 263, 269, 277, 281, 282, 322, 337,338, 354, 365, 428, 441, 443, 456, 467, 476, 484, 503, 508,554, 567, 575, 579, 588, 601, 606, 609, 611, 621, 636: n = A,T,C or G
tgcgngccggtttggcccttctttgtangacactttcatccgccctgaaatcttcccgatcgttaataactcctcaggtccctgcctgcacagggttttttcttantttgttgcctaacagtacaccaaatgtgacatcctttcaccaatatngattncttcataccacatcntcnatgganacgactncaacaattttttgatnacccnaaanactgggggctnnaanaagtacantctggagcagcatggacctgtcngcnactaanggaacaanagtnntgaacatttacacaacctttggtatgtcttactgaaaganagaaacatgcttctnnccctagaccacgaggncaaccgcaganattgccaatgccaagtccgagcggttagatcaggtaatacattccatggatgcattacatacnttgtccccgaaananaagatgccctaanggcttcttcanactggtccngaaaacanctacacctggtgcttgganaacanactctttggaagatcatctggcacaagttccccccagtgggttttnccttggcacctancttaccanatcnattcggaanccattctttgccntggcnttntnttgggaccantcttctcacaactgnaccc

SEQ ID NO: 48 - DNA, 257 bp, Homo sapiens
actagtatatgaaaatgtaaatatcacttgtgtactcaaacaaaagttggtcttaagcttccaccttgagcagccttggaaacctaacctgcctcttttagcataatcacattttctaaatgattttctttgttcctgaaaaagtgatttgtattagttttacatttgttttttggaagattatatttgtatatgtatcatcataaaatatttaaataaaaagtatctttagagtgaaaaaaaaaaaaaaaaaaaaa

SEQ ID NO: 49 - DNA, 652 bp, Homo sapiens
  misc_feature 410, 428, 496, 571, 647: n = A,T,C or G
actagttcagatgagtggctgctgaaggggcccccttgtcattttcattataacccaatttccacttatttgaactcttaagtcataaatgtataatgacttatgaattagcacagttaagttgacactagaaactgcccatttctgtattacactatcaaataggaaacattggaaagatggggaaaaaaatcttattttaaaatggcttagaaagttttcagattactttgaaaattctaaacttctttctgtttccaaaacttgaaaatatgtagatggactcatgcattaagactgttttcaaagctttcctcacatttttaaagtgtgattttccttttaatatacatatttattttctttaaagcagctatatcccaacccatgactttggagatatacctatnaaaccaatataacagcanggttattgaagcagctttctcaaatgttgcttcagatgtgcaagttgcaaattttattgtatttgtanaatacaatttttgttttaaactgtatttcaatctatttctccaagatgcttttcatatagagtgaaatatcccangataactgcttctgtgtcgtcgcatttgacgcataactgcacaaatgaacagtgtatacctcttggttgtgcattnacccc

SEQ ID NO: 50 - DNA, 650 bp, Homo sapiens
  misc_feature 237, 270, 311, 443, 454, 488, 520, 535, 539, 556, 567, 594,603, 634: n = A,T,C or G
ttgcgctttgatttttttagggcttgtgccctgtttcacttatagggtctagaatgcttgtgttgagtaaaaaggagatgcccaatattcaaagctgctaaatgttctctttgccataaagactccgtgtaactgtgtgaacacttgggatttttctcctctgtcccgaggtcgtcgtctgctttcttttttgggttctttctagaagattgagaaatgcatatgacaggctgagancacctccccaaacacacaagctctcagccacangcagcttctccacagccccagcttcgcacaggctcctgganggctgcctgggggaggcagacatgggagtgccaaggtggccagatggttccaggactacaatgtctttatttttaactgtttgccactgctgccctcacccctgcccggctctggagtaccgtctgccccanacaagtgggantgaaatgggggtgggggggaacactgattcccanttagggggtgcctaactgaacagtagggatanaaggtgtgaacctgngaantgcttttataaattatnttccttgttanatttattttttaatttaatctctgttnaactgcccngggaaaaggggaaaaaaaaaaaaaaattctntttaaacacatgaaca

SEQ ID NO: 51 - DNA, 545 bp, Homo sapiens
  misc_feature 66, 159, 195, 205, 214, 243, 278, 298, 306, 337, 366, 375,382, 405, 446, 477, 492, 495, 503, 507, 508, 521, 537: n = A,T,C or G
tggcgtgcaaccagggtagctgaagtttgggtctgggactggagattggccattaggcctcctganattccagctcccttccaccaagcccagtcttgctacgtggcacagggcaaacctgactccctttgggcctcagtttcccctccccttcatganatgaaaagaatactactttttcttgttggtctaacnttgctggacncaaagtgtngtcattattgttgtattgggtgatgtgtncaaaactgcagaagctcactgcctatgagaggaantaagagagatagtggatganagggacanaaggagtcattatttggtatagatccacccntcccaacctttctctcctcagtccctgcncctcatgtntctggtntggtgagtcctttgtgccaccanccatcatgctttgcattgctgccatcctgggaagggggtgnatcgtctcacaacttgttgtcatcgtttganatgcatgctttcttnatnaaacaaanaaannaatgtttgacagngtttaaaataaaaaanaaacaaaa

SEQ ID NO: 52 - DNA, 678 bp, Homo sapiens
  misc_feature 98, 119, 121, 131, 136, 139, 140, 142, 143, 163, 168, 172,176, 184, 189, 190, 191, 200, 201, 205, 207, 221, 223, 229,230, 237, 240, 241, 255, 264, 266, 267, 276, 280, 288, 289,291, 297, 301, 306, 308, 314, 315, 326, 332, 335, 337: n = A,T,C or G
  misc_feature 339, 341, 343, 344, 345, 347, 350, 355, 356, 358, 362, 363,372, 379, 395, 397, 398, 400, 403, 412, 414, 421, 423, 431,435, 438, 439, 450, 457, 463, 467, 471, 474, 480, 483, 484,487, 490, 491, 492, 493, 499, 500, 504, 508, 518, 536: n = A,T,C or G
  misc_feature 538, 549, 551, 552, 554, 556, 557, 562, 563, 567, 571, 572,576, 579, 590, 592, 595, 598, 606, 609, 613, 620, 622, 624,626, 631, 634, 638, 641, 647, 654, 660, 661, 674: n = A,T,C or G
actagtagaagaactttgccgcttttgtgcctctcacaggcgcctaaagtcattgccatgggaggaagacgatttggggggggagggggggggggcanggtccgtggggctttccctantntatctccatntccantgnncnntgtcgcctcttccctcgtcncattngaanttantccctggnccccnnnccctctccnncctncncctcccccctccgncncctccnnctttttntanncttccccatctccntcccccctnanngtcccaacnccgncagcaatnncncacttnctcnctccncncctccnnccgttcttctnttctcnacntntncncnnntnccntgccnntnaaannctctccccnctgcaancgattctctccctccncnnanctntccactccntncttctcncncgctcctnttcntcnncccacctctcnccttcgnccccantacnctcnccncccttncgnntcnttnnnntcctcnnaccncccncctcccttcncccctcttctccccggtntntctctctcccncnncncnncctcnncccntccnngcgnccntttccgccccncnccnccnttccttcntcnccantccatcncntntnccatnctncctnccnctcacncccgctncccccnntctctttcacacngtcc

SEQ ID NO: 53 - DNA, 502 bp, Homo sapiens
  misc_feature 139, 146, 215, 217, 257, 263, 289, 386, 420, 452, 457, 461,466, 482, 486: n = A,T,C or G
tgaagatcctggtgtcgccatgggccgccgccccgcccgttgttaccggtattgtaagaacaagccgtacccaaagtctcgcttctgccgaggtgtccctgatgccaaaattcgcatttttgacctggggcggaaaaangcaaaantggatgagtctccgctttgtggccacatggtgtcagatcaatatgagcagctgtcctctgaagccctgnangctgcccgaatttgtgccaataagtacatggtaaaaagtngtggcnaagatgcttccatatccgggtgcggntccaccccttccacgtcatccgcatcaacaagatgttgtcctgtgctggggctgacaggctcccaacaggcatgcgaagtgcctttggaaaacccanggcactgtggccagggttcacattgggccaattnatcatgttcatccgcaccaactgcagaacaangaacntgtnaattnaagccctgcccagggncaanttcaaatttcccggcc

SEQ ID NO: 54 - DNA, 494 bp, Homo sapiens
  misc_feature 431, 442, 445: n = A,T,C or G
actagtccaagaaaaatatgcttaatgtatattacaaaggctttgtatatgttaacctgttttaatgccaaaagtttgctttgtccacaatttccttaagacctcttcagaaagggatttgtttgccttaatgaatactgttgggaaaaaacacagtataatgagtgaaaagggcagaagcaagaaatttctacatcttagcgactccaagaagaatgagtatccacatttagatggcacattatgaggactttaatctttccttaaacacaataatgttttcttttttcttttattcacatgatttctaagtatatttttcatgcaggacagtttttcaaccttgatgtacagtgactgtgttaaatttttctttcagtggcaacctctataatctttaaaatatggtgagcatcttgtctgttttgaangggatatgacnatnaatctatcagatgggaaatcctgtttccaagttagaaaaaaaaaaaaaa

SEQ ID NO: 55 - DNA, 606 bp, Homo sapiens
  misc_feature 375, 395, 511, 542, 559, 569, 578, 581: n = A,T,C or G
actagtaaaaagcagcattgccaaataatccctaattttccactaaaaatataatgaaatgatgttaagctttttgaaaagtttaggttaaacctactgttgttagattaatgtatttgttgcttccctttatctggaatgtggcattagcttttttattttaaccctctttaattcttattcaattccatgacttaaggttggagagctaaacactgggatttttggataacagactgacagttttgcataattataatcggcattgtacatagaaaggatatggctaccttttgttaaatctgcactttctaaatatcaaaaaagggaaatgaagtataaatcaatttttgtataatctgtttgaaacatganttttatttgcttaatattanggctttgcccttttctgttagtctcttgggatcctgtgtaaaactgttctcattaaacaccaaacagttaagtccattctctggtactagctacaaattccgtttcatattctacntaacaatttaaattaactgaaatatttctanatggtctacttctgtcntataaaaacnaaacttganttnccaaaaaaaaaaaaaaaaaaaaaaa

SEQ ID NO: 56 - DNA, 183 bp, Homo sapiens
actagtatatttaaacttacaggcttatttgtaatgtaaaccaccattttaatgtactgtaattaacatggttataatacgtacaatccttccctcatcccatcacacaactttttttgtgtgtgataaactgattttggtttgcaataaaaccttgaaaaataaaaaaaaaaaaaaaaaaaa

SEQ ID NO: 57 - DNA, 622 bp, Homo sapiens
  misc_feature 358, 368, 412, 414, 425, 430, 453, 455, 469, 475, 495, 499,529, 540, 564, 575, 590: n = A,T,C or G
actagtcactactgtcttctccttgtagctaatcaatcaatattcttcccttgcctgtgggcagtggagagtgctgctgggtgtacgctgcacctgcccactgagttggggaaagaggataatcagtgagcactgttctgctcagagctcctgatctaccccaccccctaggatccaggactgggtcaaagctgcatgaaaccaggccctggcagcaacctgggaatggctggaggtgggagagaacctgacttctctttccctctccctcctccaacattactggaactctatcctgttagggatcttctgagcttgtttccctgctgggtgggacagaagacaaaggagaaggganggtctacaanaagcagcccttctttgtcctctggggttaatgagcttgacctananttcatggaganaccanaagcctctgatttttaatttccntnaaatgtttgaagtntatatntacatatatatatttctttnaatntttgagtctttgatatgtcttaaaatccantccctctgccngaaacctgaattaaaaccatgaanaaaaatgtttnccttaaagatgttantaattaattgaaacttgaaaaaaaaaaaaaaa

SEQ ID NO: 58 - DNA, 433 bp, Homo sapiens
gaacaaattctgattggttatgtaccgtcaaaagacttgaagaaatttcatgattttgcagtgtggaagcgttgaaaattgaaagttactgcttttccacttgctcatatagtaaagggatcctttcagctgccagtgttgaataatgtatcatccagagtgatgttatctgtgacagtcaccagctttaagctgaaccattttatgaataccaaataaatagacctcttgtactgaaaacatatttgtgactttaatcgtgctgcttggatagaaatatttttactggttcttctgaattgacagtaaacctgtccattatgaatggcctactgttctattatttgttttgacttgaatttatccaccaaagacttcatttgtgtatcatcaataaagttgtatgtttcaactgaaaaaaaaaaaaaaaaaa

SEQ ID NO: 59 - DNA, 649 bp, Homo sapiens
  misc_feature 22, 190, 217, 430, 433, 484, 544, 550, 577, 583, 594: n = A,T,C or G
actagttattatctgactttcnggttataatcattctaatgagtgtgaagtagcctctggtgtcatttggatttgcatttctctgatgagtgatgctatcaagcacctttgctggtgctgttggccatatgtgtatgttccctggagaagtgtctgtgctgagccttggcccactttttaattaggcgtntgtctttttattactgagttgtaaganttctttatatattctggattctagacccttatcagatacatggtttgcaaatattttctcccattctgtgggttgtgttttcactttatcgataatgtccttagacatataataaatttgtattttaaaagtgacttgatttgggctgtgcaaggtgggctcacgcttgtaatcccagcactttgggagactgaggtgggtggatcatatgangangctaggagttcgaggtcagcctggccagcatagcgaaaacttgtctctacnaaaaatacaaaaattagtcaggcatggtggtgcacgtctgtaataccagcttctcaggangctgangcacaaggatcacttgaaccccagaangaagangttgcagtganctgaagatcatgccagggcaacaaaaatgagaacttgtttaaaaaaaaaaaaaaa

SEQ ID NO: 60 - DNA, 423 bp, Homo sapiens
  misc_feature 209, 222, 277, 389, 398: n = A,T,C or G
actagttcaggccttccagttcactgacaaacatggggaagtgtgcccagctggctggaaacctggcagtgataccatcaagcctgatgtccaaaagagcaaagaatatttctccaagcagaagtgagcgctgggctgttttagtgccaggctgcggtgggcagccatgagaacaaaacctcttctgtattttttttttccattagtanaacacaagactcngattcagccgaattgtggtgtcttacaaggcagggctttcctacagggggtgganaaaacagcctttcttcctttggtaggaatggcctgagttggcgttgtgggcaggctactggtttgtatgatgtattagtagagcaacccattaatcttttgtagtttgtatnaaacttganctgagaccttaaacaaaaaaaaaaa

SEQ ID NO: 61 - DNA, 423 bp, Homo sapiens
  misc_feature 195, 285, 295, 329, 335, 340, 347, 367, 382, 383, 391, 396,418: n = A,T,C or G
cgggactggaatgtaaagtgaagttcggagctctgagcacgggctcttcccgccgggtcctccctccccagaccccagagggagaggcccaccccgcccagccccgccccagcccctgctcaggtctgagtatggctgggagtcgggggccacaggcctctagctgtgctgctcaagaagactggatcagggtanctacaagtggccgggccttgcctttgggattctaccctgttcctaatttggtgttggggtgcggggtccctggcccccttttccacactncctccctccngacagcaacctcccttggggcaattgggcctggntctccncccgntgttgcnaccctttgttggtttaaggnctttaaaaatgttannttttcccntgccngggttaaaaaaggaaaaaactnaaaaa

SEQ ID NO: 62 - DNA, 683 bp, Homo sapiens
  misc_feature 218, 291, 305, 411, 416, 441, 443, 453, 522, 523, 536, 542,547, 566, 588, 592, 595, 603, 621, 628, 630, 632, 644, 645,648, 655, 660, 672, 674, 676, 677, 683: n = A,T,C or G
gctggagaggggtacggactttcttggagttgtcccaggttggaatgagactgaactcaagaagagaccctaagagactggggaatggttcctgccttcaggaaagtgaaagacgcttaggctgtcaacacttaaaggaagtccccttgaagcccagagtggacagactagacccattgatggggccactggccatggtccgtggacaagacattccngtgggccatggcacaccgggggggatcaaaatgtgtacttgtggggtctcgccccttgccaaaaccaaaccantcccactcctgtcnttggactttcttcccattccctcctccccaaatgcacttcccctcctccctctgcccctcctgtgtttttggaattctgtttccctcaaaattgttaattttttanttttngaccatgaacttatgtttggggtcnangttccccttnccaatgcatactaatatattaatggttatttatttttgaaatattttttaatgaacttggaaaaaattnntggaatttccttncttccnttttntttggggggggtggggggntgggttaaaatttttttggaancccnatnggaaattnttacttggggcccccctnaaaaaantnanttccaattcttnnatngcccctnttccnctaaaaaaaaananannaaaaan

SEQ ID NO: 63 - DNA, 731 bp, Homo sapiens
  misc_feature 237, 249, 263, 288, 312, 317, 323, 326, 337, 352, 362, 370,377, 400, 411, 414, 434, 436, 446, 457, 473, 486, 497, 498,502, 512, 531, 546, 554, 563, 565, 566, 588, 597, 608, 611,613, 615, 627, 632, 640, 641, 644, 654, 660, 663, 665: n = A,T,C or G
  misc_feature 671, 678, 692, 697, 698, 699, 704, 705, 712, 714, 717, 718,719, 723, 725, 730, 731: n = A,T,C or G
actagtcataaagggtgtgcgcgtcttcgacgtggcggtcttggcgccactgctgcgagacccggccctggacctcaaggtcatccacttggtgcgtgatccccgcgcggtggcgagttcacggatccgctcgcgccacggcctcatccgtgagagcctacaggtggtgcgcagccgagaccgcgagctcaccgcatgcccttcttggaggccgcgggccacaagcttggcgcccanaaagaaggcgtngggggcccgcaaantaccacgctctgggcgctatggaangtcctcttgcaataatattggttnaaaanctgcanaanagcccctgcanccccctgaactgggntgcagggccncttacctngtttggntgcggttacaaagaacctgtttnggaaaaccctnccnaaaaccttccgggaaaattntncaaatttttnttggggaattnttgggtaaaccccccnaaaatgggaaacntttttgccctnnaaantaaaccattnggttccgggggcccccccncaaaacccttttttntttttttntgcccccantnnccccccggggcccctttttttnggggaaaanccccccccctnccnananttttaaaagggnggganaatttttnnttnccccccgggncccccnggngntaaaanggtttcncccccccgaggggnggggnnncctcnnaaacccntntcnnnaccncnttttnn

SEQ ID NO: 64 - DNA, 313 bp, Homo sapiens
  misc_feature 240: n = A,T,C or G
actagttgtgcaaaccacgactgaagaaagacgaaaagtgggaaataacttgcaacgtctgttagagatggttgctacacatgttgggtctgtagagaaacatcttgaggagcagattgctaaagttgatagagaatatgaagaatgcatgtcagaagatctctcggaaaatattaaagagattagagataagtatgagaagaaagctactctaattaagtcttctgaagaatgaagatnaaatgttgatcatgtatatatatccatagtgaataaaattgtctcagtaaagttgtaaaaaaaaaaaaaaaaa

SEQ ID NO: 65 - DNA, 420 bp, Homo sapiens
  misc_feature 400, 402, 403, 404, 405, 406, 409, 411, 412, 414, 415, 416: n = A,T,C or G
actagttccctggcaggcaagggcttccaactgaggcagtgcatgtgtggcagagagaggcaggaagctggcagtggcagcttctgtgtctagggaggggtgtggctccctccttccctgtctgggaggttggagggaagaatctaggccttagcttgccctcctgccacccttccccttgtagatactgccttaacactccctcctctctcagctgtggctgccacccaagccaggtttctccgtgctcactaatttatttccaggaaaggtgtgtggaagacatgagccgtgtataatatttgttttaacattttcattgcaagtattgaccatcatccttggttgtgtatcgttgtaacacaaattaatgatattaaaaagcatccaaacaaagccnannnnnaanannannngaaa

SEQ ID NO: 66 - DNA, 676 bp, Homo sapiens
  misc_feature 328, 454, 505, 555, 586, 612, 636, 641: n = A,T,C or G
actagtttcctatgatcattaaactcattctcagggttaagaaaggaatgtaaatttctgcctcaatttgtacttcatcaataagtttttgaagagtgcagatttttagtcaggtcttaaaaataaactcacaaatctggatgcatttctaaattctgcaaatgtttcctggggtgacttaacaaggaataatcccacaatatacctagctacctaatacatggagctggggctcaacccactgtttttaaggatttgcgcttacttgtggctgaggaaaaataagtagttccgagggaagtagtttttaaatgtgagcttatagatnggaaacagaatatcaacttaattatggaaattgttagaaacctgttctcttgttatctgaatcttgattgcaattactattgtactggatagactccagcccattgcaaagtctcagatatcttanctgtgtagttgaattccttggaaattctttttaagaaaaaattggagtttnaaagaaataaacccctttgttaaatgaagcttggctttttggtgaaaaanaatcatcccgcagggcttattgtttaaaaanggaattttaagcctccctggaaaaanttgttaattaaatggggaaaatgntgggnaaaaattatccgttagggtttaaagggaaaactta

SEQ ID NO: 67 - DNA, 620 bp, Homo sapiens
  misc_feature 419, 493, 519, 568, 605, 610: n = A,T,C or G
caccattaaagctgcttaccaagaacttccccagcattttgacttccttgtttgatagctgaattgtgagcaggtgatagaagagcctttctagttgaacatacagataatttgctgaatacattccatttaatgaaggggttacatctgttacgaagctactaagaaggagcaagagcataggggaaaaaaatctgatcagaacgcatcaaactcacatgtgccccctctactacaaacagattgtagtgctgtggtggtttattccgttgtgcagaacttgcaagctgagtcactaaacccaaagagaggaaattataggttagttaaacattgtaatcccaggaactaagtttaattcacttttgaagtgttttgttttttatttttggtttgtctgatttactttgggggaaaangctaaaaaaaaagggatatcaatctctaattcagtgcccactaaaagttgtccctaaaaagtctttactggaanttatgggactttttaagctccaggtnttttggtcctccaaattaaccttgcatgggccccttaaaattgttgaanggcattcctgcctctaagtttggggaaaattcccccnttttnaaaatttgga

SEQ ID NO: 68 - DNA, 551 bp, Homo sapiens
  misc_feature 286, 464, 480, 501, 502, 518, 528, 533, 536, 537, 538, 539,540, 541, 543, 544, 545, 547, 548, 549: n = A,T,C or G
actagtagctggtacataatcactgaggagctatttcttaacatgcttttatagaccatgctaatgctagaccagtatttaagggctaatctcacacctccttagctgtaagagtctggcttagaacagacctctctgtgcaataacttgtggccactggaaatccctgggccggcatttgtattggggttgcaatgactcccaagggccaaaagagttaaaggcacgactgggatttcttctgagactgtggtgaaactccttccaaggctgagggggtcagtangtgctctgggagggactcggcaccactttgatattcaacaagccacttgaagcccaattataaaattgttattttacagctgatggaactcaatttgaaccttcaaaactttgttagtttatcctattatattgttaaacctaattacatttgtctagcattggatttggttcctgtngcatatgtttttttcncctatgtgctcccctcccccnnatcttaatttaaaccncaattttgcnattcnccnnnnnnannnannnaa

SEQ ID NO: 69 - DNA, 396 bp, Homo sapiens
  misc_feature 235, 310, 323, 381: n = A,T,C or G
cagaaatggaaagcagagttttcatttctgtttataaacgtctccaaacaaaaatggaaagcagagttttcattaaatccttttaccttttttttttcttggtaatcccctcaaataacagtatgtgggatattgaatgttaaagggatatttttttctattatttttataattgtacaaaattaagcaaatgttaaaagttttatatgctttattaatgttttcaaaaggtatnatacatgtgatacattttttaagcttcagttgcttgtcttctggtactttctgttatgggcttttggggagccanaaaccaatctacnatctctttttgtttgccaggacatgcaataaaatttaaaaaataaataaaaactattnagaaattgaaaaaaa

SEQ ID NO: 70 - DNA, 536 bp, Homo sapiens
  misc_feature 388, 446, 455: n = A,T,C or G
actagtgcaaaagcaaatataaacatcgaaaaggcgttcctcacgttagctgaagatatccttcgaaagacccctgtaaaagagcccaacagtgaaaatgtagatatcagcagtggaggaggcgtgacaggctggaagagcaaatgctgctgagcattctcctgttccatcagttgccatccactaccccgttttctcttcttgctgcaaaataaaccactctgtccatttttaactctaaacagatatttttgtttctcatcttaactatccaagccacctattttatttgttctttcatctgtgactgcttgctgactttatcataattttcttcaaacaaaaaaatgtatagaaaaatcatgtctgtgacttcatttttaaatgntacttgctcagctcaactgcatttcagttgttttatagtccagttcttatcaacattnaaacctatngcaatcatttcaaatctattctgcaaattgtataagaataaaagttagaatttaacaattaaaaaaaaaaaaaaaaaaaaa

SEQ ID NO: 71 - DNA, 865 bp, Homo sapiens
  misc_feature 22, 35, 39, 56, 131, 138, 146, 183, 194, 197, 238, 269, 277,282, 297, 316, 331, 336, 340, 341, 346, 349, 370, 376, 381,382, 392, 396, 397, 401, 433, 444, 445, 454, 455, 469, 472,477, 480, 482, 489, 497, 499, 511, 522, 526, 527: n = A,T,C or G
  misc_feature 545, 553, 556, 567, 574, 580, 610, 613, 634, 638, 639, 663,672, 689, 693, 694, 701, 704, 713, 723, 729, 732, 743, 744,749, 761, 765, 767, 769, 772, 774, 780, 783, 788, 792, 803,810, 824, 840, 848: n = A,T,C or G
gacaaagcgttaggagaagaanagaggcagggaanactncccaggcacgatggccnccttcccaccagcaaccagcgccccccaccagcccccaggcccggacgacgaagactccatcctggattaatctnacctctntcgcctgncccattcctacctcggaggtggaggccggaaaggtcncaccaagaganaanctgctgccaacaccaaccgccccagccctggcgggcacganaggaaactggtgaccaatctgcagaattctnagaggaanaagcnaggggccccgcgctnagacagagctggatatgangccagaccatggacnctacncccnncaatncanacgggactgcggaagatggangacccncgacnngatcaggccngctnnccanccccccacccctatgaattattcccgctgaangaatctctgannggcttccannaaagcgcctccccnccnaacgnaantncaacatngggattanangctgggaactgnaaggggcaaancctnnaatatccccagaaacaanctctcccnaanaaactggggcncctcatnggtggnaccaactattaactaaaccgcacgccaagnaantataaaaggggggcccctccncggnngacccccttttgtcccttaatganggttatccnccttgcgtaccatggtncccnnttctgtntgnatgtttccnctcccctccncctatntcnagccgaactcnnatttncccgggggtgcnatcnantngtncncctttnttngttgncccngccctttccgncggaacncgtttccccgttantaacggcacccggggnaagggtgnttggccccctccctccc

SEQ ID NO: 72 - DNA, 560 bp, Homo sapiens
  misc_feature 83, 173, 183, 186, 209, 211, 215, 255, 321, 322, 323, 335,344, 357, 361, 368, 394, 412, 415, 442, 455, 469, 472, 475,487, 513, 522, 528, 531, 534, 546: n = A,T,C or G
cctggacttgtcttggttccagaacctgacgacccggcgacggcgacgtctcttttgactaaaagacagtgtccagtgctccngcctaggagtctacggggaccgcctcccgcgccgccaccatgcccaacttctctggcaactggaaaatcatccgatcggaaaacttcgangaattgctcnaantgctgggggtgaatgtgatgctnangaanattgctgtggctgcagcgtccaagccagcagtggagatcnaacaggagggagacactttctacatcaaaacctccaccaccgtgcgcaccacaaagattaacttcnnngttggggaggantttgaggancaaactgtggatnggangcctgtnaaaacctggtgaaatgggagaatganaataaaatggtctgtgancanaaactcctgaaaggagaaggcccccanaactcctggaccngaaaaactgacccnccnatnggggaactgatncttgaaccctgaacgggcgggatganccttttttnttgccnccnaangggttctttccntttccccaaaaaaa

SEQ ID NO: 73 - DNA, 379 bp, Homo sapiens
  misc_feature 8, 17, 18, 21, 26, 29, 30, 32, 53, 56, 67, 71, 81, 102, 104,111, 112, 114, 119, 122, 124, 125, 134, 144, 146, 189, 190,214, 215, 219, 220, 235, 237, 246, 280, 288, 302, 310, 313,319, 322, 343, 353, 354: n = A,T,C or G
ctgggganccggcggtnngcnccatntcnngncgcgaaggtggcaataaaaanccnctgaaaccgcncaanaaacatgccnaagatatggacgaggaagatngngctttcnngnacaancgnanngaggaacanaacaaactcnangagctctcaagctaatgccgcggggaaggggcccttggccacnngtggaattaagaaatctggcaaanngtanntgttccttgtgcctnangagataagngaccctttatttcatctgtatttaaacctctctnttccctgncataacttcttttnccacgtanagntggaantanttgttgtcttggactgttgtncattttagannaaacttttgttcaaaaaaaaaataa

SEQ ID NO: 74 - DNA, 437 bp, Homo sapiens
  misc_feature 145, 355: n = A,T,C or G
actagttcagactgccacgccaaccccagaaaataccccacatgccagaaaagtgaagtcctaggtgtttccatctatgtttcaatctgtccatctaccaggcctcgcgataaaaacaaaacaaaaaaacgctgccaggttttanaagcagttctggtctcaaaaccatcaggatcctgccaccagggttcttttgaaatagtaccacatgtaaaagggaatttggctttcacttcatctaatcactgaattgtcaggctttgattgataattgtagaaataagtagccttctgttgtgggaataagttataatcagtattcatctctttgttttttgtcactcttttctctctnattgtgtcatttgtactgtttgaaaaatatttcttctataaaattaaactaacctgccttaaaaaaaaaaaaaaaaaaaaaa

SEQ ID NO: 75 - DNA, 579 bp, Homo sapiens
  misc_feature 440, 513, 539, 551: n = A,T,C or G
ctccgtcgccgccaagatgatgtgcggggcgccctccgccacgcagccggccaccgccgagacccagcacatcgccgaccaggtgaggtcccagcttgaagagaaagaaaacaagaagttccctgtgtttaaggccgtgtcattcaagagccaggtggtcgcggggacaaactacttcatcaaggtgcacgtcggcgacgaggacttcgtacacctgcgagtgttccaatctctccctcatgaaaacaagcccttgaccttatctaactaccagaccaacaaagccaagcatgatgagctgacctatttctgatcctgactttggacaaggcccttcagccagaagactgacaaagtcatcctccgtctaccagagcgtgcacttgtgatcctaaaataagcttcatctccgggctgtgcccttggggtggaaggggcangatctgcactgcttttgcatttctcttcctaaatttcattgtgttgattctttccttccaataggtgatcttnattactttcagaatattttccaaatnagatatattttnaaaatccttaaaaaaaaaaaaaaaaaaa

SEQ ID NO: 76 - DNA, 666 bp, Homo sapiens
  misc_feature 411, 470, 476, 491, 506, 527, 560, 570, 632, 636, 643, 650,654, 658: n = A,T,C or G
gtttatcctatctctccaaccagattgtcagctccttgagggcaagagccacagtatatttccctgtttcttccacagtgcctaataatactgtggaactaggttttaataattttttaattgatgttgttatgggcaggatggcaaccagaccattgtctcagagcaggtgctggctctttcctggctactccatgttggctagcctctggtaacctcttacttattatcttcaggacactcactacagggaccagggatgatgcaacatccttgtctttttatgacaggatgtttgctcagcttctccaacaataaaaagcacgtggtaaaacacttgcggatattctggactgtttttaaaaaatatacagtttaccgaaaatcatattatcttacaatgaaaaggantttatagatcagccagtgaacaaccttttcccaccatacaaaaattccttttcccgaangaaaanggctttctcaataancctcactttcttaanatcttacaagatagccccganatcttatcgaaactcattttaggcaaatatganttttattgtncgttacttgtttcaaaatttggtattgtgaatatcaattaccacccccatctcccatgaaanaaangggaaanggtgaanttcntaancgcttaaa

SEQ ID NO: 77 - DNA, 396 bp, Homo sapiens
  misc_feature 31, 54, 125, 128, 136, 163, 168, 198: n = A,T,C or G
ctgcagcccgggggatccactaatctaccanggttatttggcagctaattctanatttggatcattgcccaaagttgcacttgctggtctcttgggatttggccttggaaaggtatcatacatangantatgccanaataaattccatttttttgaaaatcanctccntggggctggttttggtccacagcataacangcactgcctccttacctgtgaggaatgcaaaataaagcatggattaagtgagaagggagactctcagccttcagcttcctaaattctgtgtctgtgactttcgaagttttttaaacctctgaatttgtacacatttaaaatttcaagtgtactttaaaataaaatacttctaatgggaacaaaaaaaaaaaaaaaaaa

SEQ ID NO: 78 - DNA, 793 bp, Homo sapiens
  misc_feature 309, 492, 563, 657, 660, 703, 708, 710, 711, 732, 740, 748,758, 762, 765, 787: n = A,T,C or G
gcatcctagccgccgactcacacaaggcaggtgggtgaggaaatccagagttgccatggagaaaattccagtgtcagcattcttgctccttgtggccctctcctacactctggccagagataccacagtcaaacctggagccaaaaaggacacaaaggactctcgacccaaactgccccagaccctctccagaggttggggtgaccaactcatctggactcagacatatgaagaagctctatataaatccaagacaagcaacaaacccttgatgattattcatcacttggatgagtgcccacacagtcnagctttaaagaaagtgtttgctgaaaataaagaaatccagaaattggcagagcagtttgtcctcctcaatctggtttatgaaacaactgacaaacacctttctcctgatggccagtatgtcccaggattatgtttgttgacccatctctgacagttgaagccgatatcctgggaagatattcnaaccgtctctatgcttacaaactgcagatacgctctgttgcttgacacatgaaaaagctctcaagttgctnaaaatgaattgtaagaaaaaaaatctccagccttctgtctgtcggcttgaaaattgaaaccagaaaaatgtgaaaaatggctattgtggaacanatngacacctgattaggttttggttatgttcaccactatttttaanaaaanannttttaaaatttggttcaattntctttttnaaacaatntgtttctacnttgnganctgatttctaaaaaaaataatntttggc

SEQ ID NO: 79 - DNA, 456 bp, Homo sapiens
  misc_feature 89, 195, 255, 263, 266, 286, 353, 384, 423, 425, 436, 441: n = A,T,C or G
actagtatggggtgggaggccccacccttctcccctaggcgctgttcttgctccaaagggctccgtggagagggactggcagagctgangccacctggggctggggatcccactcttcttgcagctgttgagcgcacctaaccactggtcatgcccccacccctgctctccgcacccgcttcctcccgaccccangaccaggctacttctcccctcctcttgcctccctcctgcccctgctgcctctgatcgtangaattgangantgtcccgccttgtggctganaatggacagtggcaggggctggaaatgggtgtgtgtgtgtgtgtgtgtgtgtgtgtgtgtgtgtgcnccccccctgcaagaccgagattgagggaaancatgtctgctgggtgtgaccatgtttcctctccataaantncccctgtgacnctcanaaaaaaaaaaaaaaa

SEQ ID NO: 80 - DNA, 284 bp, Homo sapiens
  misc_feature 283: n = A,T,C or G
ctttgtacctctagaaaagataggtattgtgtcatgaaacttgagtttaaattttatatataaaactaaaagtaatgctcactttagcaacacatactaaaattggaaccatactgagaagaatagcatgacctccgtgcaaacaggacaagcaaatttgtgatgtgttgattaaaaagaaataaataaatgtgtatatgtgtaacttgtatgtttatgtggaatacagattgggaaataaaatgtatttcttactgtgaaaaaaaaaaaaaaaaaaaaaaana

SEQ ID NO: 81 - DNA, 671 bp, Homo sapiens
  misc_feature 388, 505, 600, 603, 615, 642, 644, 660: n = A,T,C or G
gccaccaacattccaagctaccctgggtacctttgtgcagtagaagctagtgagcatgtgagcaagcggtgtgcacacggagactcatcgttataatttactatctgccaagagtagaaagaaaggctggggatatttgggttggcttggttttgattttttgcttgtttgtttgttttgtactaaaacagtattatcttttgaatatcgtagggacataagtatatacatgttatccaatcaagatggctagaatggtgcctttctgagtgtctaaaacttgacacccctggtaaatctttcaacacacttccactgcctgcgtaatgaagttttgattcatttttaaccactggaatttttcaatgccgtcattttcagttagatnattttgcactttgagattaaaatgccatgtctatttgattagtcttatttttttatttttacaggcttatcagtctcactgttggctgtcattgtgacaaagtcaaataaacccccnaggacaacacacagtatgggatcacatattgtttgacattaagctttggccaaaaaatgttgcatgtgttttacctcgacttgctaaatcaatancanaaaggctggctnataatgttggtggtgaaataattaatnantaaccaaaaaaaaaanaaaaaaaaaaa

SEQ ID NO: 82 - DNA, 217 bp, Homo sapiens
  misc_feature 35: n = A,T,C or G
ctgcagatgtttcttgaatgctttgtcaaattaanaaagttaaagtgcaataatgtttgaagacaataagtggtggtgtatcttgtttctaataagataaacttttttgtctttgctttatcttattagggagttgtatgtcagtgtataaaacatactgtgtggtataacaggcttaataaattctttaaaaggaaaaaaaaaaaaaaaaaaaaaa

SEQ ID NO: 83 - DNA, 460 bp, Homo sapiens
  misc_feature 104, 118, 172, 401, 422, 423, 444, 449: n = A,T,C or G
cgcgagtgggagcaccaggatctcgggctcggaacgagactgcacggattgttttaagaaaatggcagacaaaccagacatgggggaaatcgccagcttcgatnaggccaagctgaanaaaacggagacgcaggagaagaacaccctgccgaccaaagagaccattgagcangagaagcggagtgaaatttcctaagatcctggaggatttcctacccccgtcctcttcgagaccccagtcgtgatgtggaggaagagccacctgcaagatggacacgagccacaagctgcactgtgaacctgggcactccgcgccgatgccaccggcctgtgggtctctgaagggaccccccccaatcggactgccaaattctccggtttgccccgggatattatacaanattatttgtatgaataatgannataaaacacacctcgtggcancaaanaaaaaaaaaaa

SEQ ID NO: 84 - DNA, 323 bp, Homo sapiens
  misc_feature 70, 138, 178, 197, 228, 242, 244, 287, 311: n = A,T,C or G
tggtggatcttggctctgtggagctgctgggacgggatctaaaagactattctggaagctgtggtccaangcattttgctggcttaacgggtcccggaacaaaggacaccagctctctaaaattgaagtttacccganataacaatcttttgggcagagatgcctattttaacaaacnccgtccctgcgcaacaacnaacaatctctgggaaataccggccatgaacntgctgtctcaatcnancatctctctagctgaccgatcatatcgtcccagattactacanatcataataattgatttcctgtanaaaaaaaaaaaa

SEQ ID NO: 85 - DNA, 771 bp, Homo sapiens
  misc_feature 63, 426, 471, 497, 521, 554, 583, 586, 606, 609, 615, 652,686, 691, 694, 695, 706, 713, 730, 732, 743, 751: n = A,T,C or G
aaactgggtactcaacactgagcagatctgttctttgagctaaaaaccatgtgctgtaccaanagtttgctcctggctgctttgatgtcagtgctgctactccacctctgcggcgaatcagaagcaagcaactttgactgctgtcttggatacacagaccgtattcttcatcctaaatttattgtgggcttcacacggcagctggccaatgaaggctgtgacatcaatgctatcatctttcacacaaagaaaaagttgtctgtgtgcgcaaatccaaaacagacttgggtgaaatatattgtgcgtctcctcagtaaaaaagtcaagaacatgtaaaaactgtggcttttctggaatggaattggacatagcccaagaacagaaagaacttgctggggttggaggtttcacttgcacatcatgganggtttagtgcttatcttatttgtgcctcctggacttgtccaattnatgaagttaatcatattgcatcatantttgctttgtttaacatcacattnaaattaaactgtattttatgttatttatagctntaggttttctgtgtttaactttttatacnaantttcctaaactattttggtntantgcaanttaaaaattatatttggggggggaataaatattggantttctgcagccacaagctttttttaaaaaaccantacanccnngttaaatggtnggtcccnaatggtttttgcttttnantagaaaatttnttagaacnatttgaaaaaaaaaaaaaaa

SEQ ID NO: 86 - DNA, 628 bp, Homo sapiens
  misc_feature 162, 249, 266, 348, 407, 427, 488, 518, 545, 566, 569, 597,598, 611, 617, 621, 624: n = A,T,C or G
actagtttgctttacatttttgaaaagtattatttttgtccaagtgcttatcaactaaaccttgtgttaggtaagaatggaatttattaagtgaatcagtgtgacccttcttgtcataagattatcttaaagctgaagccaaaatatgcttcaaaagaaaangactttattgttcattgtagttcatacattcaaagcatctgaactgtagtttctatagcaagccaattacatccataagtggagaangaaatagattaatgtcnaagtatgattggtggagggagcaaggttgaagataatctggggttgaaattttctagttttcattctgtacatttttagttngacatcagatttgaaatattaatgtttacctttcaatgtgtggtatcagctggactcantaacacccctttcttccctnggggatggggaatggattattggaaaatggaaagaaaaaagtacttaaagccttcctttcncagtttctggctcctaccctactgatttanccagaataagaaaacattttatcatcntctgctttattcccattaatnaanttttgatgaataaatctgcttttatgcnnacccaaggaattnagtggnttcntcnttgt

SEQ ID NO: 87 - DNA, 518 bp, Homo sapiens
  misc_feature 384, 421, 486: n = A,T,C or G
ttttttattttttttagagagtagttcagcttttatttataaatttattgcctgttttattataacaacattatactgtttatggtttaatacatatggttcaaaatgtataatacatcaagtagtacagttttaaaattttatgcttaaaacaagttttgtgtaaaaaatgcagatacattttacatggcaaatcaatttttaagtcatcctaaaaattgatttttttttgaaatttaaaaacacatttaatttcaatttctctcttatataacctttattactatagcatggtttccactacagtttaacaatgcagcaaaattcccatttcacggtaaattgggttttaagcggcaaggttaaaatgctttgaggatcctnaataccctttgaacttcaaatgaaggttatggttgtnaatttaaccctcatgccataagcagaagcacaagtttagctgcattttgctctaaactgtaaaancgagccccccgttgaaaaagcaaaagggaccc

SEQ ID NO: 88 - DNA, 1844 bp, Homo sapiens
gagacagtgaatcctagtatcaaaggatttttggcctcagaaaaagttgttgattatttttattttattttatttttcgagactccgtctcaaaaaaaaaaaaaaaaaaaagaatcacaaggtatttgctaaagcattttgagctgcttggaaaaagggaagtagttgcagtagagtttcttccatcttcttggtgctgggaagccatatatgtgtcttttactcaagctaaggggtataagcttatgtgttgaatttgctacatctatatttcacatattctcacaataagagaattttgaaatagaaatatcatagaacatttaagaaagtttagtataaataatattttgtgtgttttaatccctttgaagggatctatccaaagaaaatattttacactgagctccttcctacacgtctcagtaacagatcctgtgttagtctttgaaaatagctcattttttaaatgtcagtgagtagatgtagcatacatatgatgtataatgacgtgtattatgttaacaatgtctgcagattttgtaggaatacaaaacatggccttttttataagcaaaacgggccaatgactagaataacacatagggcaatctgtgaatatgtattataagcagcattccagaaaagtagttggtgaaataattttcaagtcaaaaagggatatggaaagggaattatgagtaacctctattttttaagccttgcttttaaattaaacgctacagccatttaagccttgaggataataaagcttgagagtaataatgttaggttagcaaaggtttagatgtatcacttcatgcatgctaccatgatagtaatgcagctcttcgagtcatttctggtcattcaagatattcacccttttgcccatagaaagcaccctacctcacctgcttactgacattgtcttagctgatcacaagatcattatcagcctccattattccttactgtatataaaatacagagttttatattttcctttcttcgtttttcaccatattcaaaacctaaatttgtttttgcagatggaatgcaaagtaatcaagtgttcgtgctttcacctagaagggtgtggtcctgaaggaaagaggtccctaaatatcccccaccctgggtgctcctccttccctggtaccctgactaccagaagtcaggtgctagagcagctggagaagtgcagcagcctgtgcttccacagatgggggtgctgctgcaacaaggctttcaatgtgcccatcttagggggagaagctagatcctgtgcagcagcctggtaagtcctgaggaggttccattgctcttcctgctgctgtcctttgcttctcaacggggctcgctctacagtctagagcacatgcagctaacttgtgcctctgcttatgcatgagggttaaattaacaaccataaccttcatttgaagttcaaaggtgtattcaggatcctcaaagcattttaaccttgccgcttaaaacccaatttaccgtgaaatgggaattttgctgcattgttaaactgtagtggaaaccatgctatagtaataaaggttatataagagagaaattgaaattaaatgtgtttttaaatttcaaaaaaaaatcaatctttaggatgacttaaaaattgatttgccatgtaaaatgtatctgcattttttacacaaaacttgttttaagcataaaattttaaaactgtactacttgatgtattatacattttgaaccatatgtattaaaccataaacagtataatgttgttataataaaacaggcaataaatttataaataaaagctgaaaaaaaaaaaaaaaaaaaaaaaa

SEQ ID NO: 89 - DNA, 523 bp, Homo sapiens
  misc_feature 288, 352, 369, 398, 475, 511, 513: n = A,T,C or G
tttttttttttttttttagtcaatccacatttattgatcacttattatgtaccaggcactgggataaagatgactgttagtcactcacagtaaggaagaaaactagcaaataagacgattacaatatgatgtagaaaatgctaagccagagatatagaaaggtcctattgggtccttctgtcaccttgtctttccacatccctacccttcacaggccttccctccagcttcctgcccccgctccccactgcagatcccctgggattttgcctagagctaaacgagganatgggccccctggccctggcatgacttgaacccaaccacagactgggaaagggagcctttcganagtggatcactttgatnagaaaacacatagggaattgaagagaaantccccaaatggccacccgtgctggtgctcaagaaaagtttgcagaatggataaatgaaggatcaagggaattaatanatgaataattgaatggtggctcaataagaatgactncnttgaatgacc

SEQ ID NO: 90 - DNA, 604 bp, Homo sapiens
  misc_feature 563: n = A,T,C or G
ccagtgtggtggaatgcaaagattaccccggaagctttcgagaagctgggattccctgcagcaaaggaaatagccaatatgtgtcgtttctatgaaatgaagccagaccgagatgtcaatctcacccaccaactaaatcccaaagtcaaaagcttcagccagtttatctcagagaaccaggggagccttcaagggcatgtagaaaatcagctgttcagataggcctctgcaccacacagcctctttcctctctgatccttttcctctttacggcacaacattcatgtttgacagaacatgctggaatgcaattgtttgcaacaccgaaggatttcctgcggtcgcctcttcagtaggaagcactgcattggtgataggacacggtaatttgattcacatttaacttgctagttagtgataaggggtggtacacctgtttggtaaaatgagaagcctcggaaacttgggagcttctctcctaccactaatggggagggcagattattactgggatttctcctggggtgaattaatttcaagccctaattgctgaaattcccctnggcaggctccagttttctcaactgcattgcaaaattccccc

SEQ ID NO: 91 - DNA, 858 bp, Homo sapiens
  misc_feature 570, 591, 655, 664, 667, 683, 711, 759, 760, 765, 777, 787,792, 794, 801, 804, 809, 817, 820: n = A,T,C or G
tttttttttttttttttttatgattattattttttttattgatctttacatcctcagtgttggcagagtttctgatgcttaataaacatttgttctgatcagataagtggaaaaaattgtcatttccttattcaagccatgcttttctgtgatattctgatcctagttgaacatacagaaataaatgtctaaaacagcacctcgattctcgtctataacaggactaagttcactgtgatcttaaataagcttggctaaaatgggacatgagtggaggtagtcacacttcagcgaagaaagagaatctcctgtataatctcaccaggagattcaacgaattccaccacactggactagtggatcccccgggctgcaggaattcgatatcaagcttatcgataccgtcgacctcgagggggggcccggtacccaattcgccctatagtgagtcgtattacgcgcgctcactggccgtcgttttacaacgtcgtgactgggaaaaccctggcgttacccaacttaatcgccttgcagcacatccccctttcgccagctggcgtaatagcgaanagcccgcaccgatcgcccttncaacagttgcgcagcctgaatggcgaatgggacgcgccctgtagcggcgcattaaagcgcggcngggtgtggnggntcccccacgtgaccgntacacttggcagcgccttacgccggtcnttcgctttcttcccttcctttctcgcaccgttcgccgggtttccccgnnagctnttaatcgggggnctccctttangggtncnaattaanggnttacnggaccttngancccaaaaactttgattagggggaaggtccccgaagggg

SEQ ID NO: 92 - DNA, 585 bp, Homo sapiens
  misc_feature 317, 319, 320, 321, 325, 327, 328, 330, 331, 332, 460, 462,483, 485, 487, 523, 538, 566, 584: n = A,T,C or G
gttgaatctcctggtgagattatacaggagattctctttcttcgctgaagtgtgactacctccactcatgtcccattttagccaagcttatttaagatcacagtgaacttagtcctgttatagacgagaatcgaggtgctgttttagacatttatttctgtatgttcaactaggatcagaatatcacagaaaagcatggcttgaataaggaaatgacaattttttccacttatctgatcagaacaaatgtttattaagcatcagaaactctgccaacactgaggatgtaaagatcaataaaaaaaataataatcatnannnaaanannannngaagggcggccgccaccgcggtggagctccagcttttgttccctttagtgagggttaattgcgcgcttggcgttaatcatggtcatagctgtttcctgtgtgaaattgttatccggctcacaattccncncaacatacgagccgggaagcntnangtgtaaaagcctgggggtgcctaattgagtgagctnactcacattaattgngttgcgctccacttgcccgcttttccantccgggaaacctgttcgnc

SEQ ID NO: 93 - DNA, 567 bp, Homo sapiens
  misc_feature 82, 158, 230, 232, 253, 266, 267, 268, 269, 270, 271, 272,273, 274, 275, 276, 277, 278, 279, 280, 281, 282, 283, 284,285, 286, 287, 295, 303, 307, 314, 349, 352, 354, 356, 366,369, 379, 382, 386, 393, 404, 427, 428, 446, 450, 452: n = A,T,C or G
  misc_feature 453, 454, 459, 462, 480, 481, 483, 488, 493, 501, 509, 511,512, 518, 520, 525, 526, 532, 541, 557: n = A,T,C or G
cggcagtgttgctgtctgcgtgtccaccttggaatctggctgaactggctgggaggaccaagactgcggctggggtgggcanggaagggaaccgggggctgctgtgaaggatcttggaacttccctgtacccaccttccccttgcttcatgtttgtanaggaaccttgtgccggccaagcccagtttccttgtgtgatacactaatgtatttgctttttttgggaaatananaaaaatcaattaaattgctantgtttctttgaannnnnnnnnnnnnnnnnnnnnngggggggncgcccccncggnggaaacncccccttttgttccctttaattgaaaggttaattngcncncntggcgttaanccntgggccaaanctngttncccgtgntgaaattgttnatcccctcccaaattcccccccnnccttccaaacccggaaancctnannntgttnaancccggggggttgcctaanngnaattnaaccnaacccccntttaaatngnntttgcncnccacnngccccnctttcccanttcggggaaaaccctntccgtgccca

SEQ ID NO: 94 - DNA, 620 bp, Homo sapiens
  misc_feature 169, 171, 222, 472, 528, 559, 599: n = A,T,C or G
actagtcaaaaatgctaaaataatttgggagaaaatattttttaagtagtgttatagtttcatgtttatcttttattatgttttgtgaagttgtgtcttttcactaattacctatactatgccaatatttccttatatctatccataacatttatactacatttgtaananaatatgcacgtgaaacttaacactttataaggtaaaaatgaggtttccaanatttaataatctgatcaagttcttgttatttccaaatagaatggacttggtctgttaagggctaaggagaagaggaagataaggttaaaagttgttaatgaccaaacattctaaaagaaatgcaaaaaaaaagtttattttcaagccttcgaactatttaaggaaagcaaaatcatttcctaaatgcatatcatttgtgagaatttctcattaatatcctgaatcattcatttcactaaggctcatgttnactccgatatgtctctaagaaagtactatttcatggtccaaacctggttgccatanttgggtaaaggctttcccttaagtgtgaaantatttaaaatgaaattttcctctttttaaaaattctttanaagggttaagggtgttgggga

SEQ ID NO: 95 - DNA, 470 bp, Homo sapiens
  misc_feature 61, 67, 79, 89, 106, 213, 271, 281, 330, 354, 387, 432, 448: n = A,T,C or G
ctcgaccttctctgcacagcggatgaaccctgagcagctgaagaccagaaaagccactatnactttntgcttaattcangagcttacangattcttcaaagagtgngtccagcatcctttgaaacatgagttcttaccagcagaagcagacctttaccccaccacctcagcttcaacagcagcaggtgaaacaacccatccagcctccacctnaggaaatatttgttcccacaaccaaggagccatgccactcaaaggttccacaacctgnaaacacaaanattccagagccaggctgtaccaaggtccctgagccagggctgtaccaangtccctgagccaggttgtaccaangtccctgagccaggatgtaccaaggtccctganccaggttgtccaaggtccctgagccaggctacaccaagggcctgngccaggcagcatcaangtccctgaccaaggcttatcaa

SEQ ID NO: 96 - DNA, 660 bp, Homo sapiens
  misc_feature 299, 311, 360, 426, 538, 540, 542, 553, 563, 565, 592, 603,604, 618, 633, 647, 649, 651, 653: n = A,T,C or G
ttttttttttttttttttttggaattaaaagcaatttaatgagggcagagcaggaaacatgcatttcttttcattcgaatcttcagatgaaccctgagcagccgaagaccagaaaagccatgaagactttctgcttaattcaggggcttacaggattcttcagagtgtgtgtgaacaaaagctttatagtacgtatttttaggatacaaataagagagagactatggcttggggtgagaatgtactgattacaaggtctacagacaattaagacacagaaacagatgggaagagggtgnccagcatctggnggttggcttctcaagggcttgtctgtgcaccaaattacttctgcttggncttctgctgagctgggcctggagtgaccgttgaaggacatggctctggtacctttgtgtagcctgncacaggaactttggtgtatccttgctcaggaactttgatggcacctggctcaggaaacttgatgaagccttggtcaagggaccttgatgcttgctggctcagggaccttggngnancctgggctcanggacctttgncncaaccttggcttcaagggacccttggnacatcctggcnnagggacccttgggnccaaccctgggcttnagggaccctttggntncnanccttggc

SEQ ID NO: 97 - DNA, 441 bp, Homo sapiens
  misc_feature 12, 308: n = A,T,C or G
gggaccatacanagtattcctctcttcacaccaggaccagccactgttgcagcatgagttcccagcagcagaagcagccctgcatcccaccccctcagcttcagcagcagcaggtgaaacagccttgccagcctccacctcaggaaccatgcatccccaaaaccaaggagccctgccaccccaaggtgcctgagccctgccaccccaaagtgcctgagccctgccagcccaaggttccagagccatgccaccccaaggtgcctgagccctgcccttcaatagtcactccagcaccagcccagcagaanaccaagcagaagtaatgtggtccacagccatgcccttgaggagccggccaccagatgctgaatcccctatcccattctgtgtatgagtcccatttgccttgcaattagcattctgtctcccccaaaaaaaaaa

SEQ ID NO: 98 - DNA, 600 bp, Homo sapiens
  misc_feature 295, 349, 489, 496, 583: n = A,T,C or G
gtattcctctcttcacaccaggaccagccactgttgcagcatgagttcccagcagcagaagcagccctgcatcccaccccctcagcttcagcagcagcaggtgaaacagccttgccagcctccacctcaggaaccatgcatccccaaaaccaaggagccctgccaccccaaggtgcctgagccctgccaccccaaagtgcctgagccctgccagcccaaggttccagagccatgccaccccaaggtgcctgagccctgcccttcaatagtcactccagcaccagcccagcagaanaccaagcagaagtaatgtggtccacagccatgcccttgaggagccggccaccanatgctgaatcccctatcccattctgtgtatgagtcccatttgccttgcaattagcattctgtctcccccaaaaaagaatgtgctatgaagctttctttcctacacactctgagtctctgaatgaagctgaaggtcttaantacaganctagttttcagctgctcagaattctctgaagaaaagatttaagatgaaaggcaaatgattcagctccttattaccccattaaattcnctttcaattccaaaaaa

SEQ ID NO: 99 - DNA, 667 bp, Homo sapiens
  misc_feature 345, 562, 635: n = A,T,C or G
actagtgactgagttcctggcaaagaaatttgacctggaccagttgataactcatgttttaccatttaaaaaaatcagtgaaggatttgagctgctcaattcaggacaaagcattcgaacggtcctgacgttttgagatccaaagtggcaggaggtctgtgttgtcatggtgaactggagtttctcttgtgagagttccctcatctgaaatcatgtatctgtctcacaaatacaagcataagtagaagatttgttgaagacatagaacccttataaagaattattaacctttataaacatttaaagtcttgtgagcacctgggaattagtataataacaatgttnatatttttgatttacattttgtaaggctataattgtatcttttaagaaaacataccttggatttctatgttgaaatggagatttttaagagttttaaccagctgctgcagatatattactcaaaacagatatagcgtataaagatatagtaaatgcatctcctagagtaatattcacttaacacattggaaactattattttttagatttgaatatnaatgttattttttaaacacttgttatgagttacttgggattacattttgaaatcagttcattccatgatgcanattactgggattagattaagaaagacggaaaa

SEQ ID NO: 100 - DNA, 583 bp, Homo sapiens
  misc_feature 404, 506, 514, 527, 528, 538, 548, 556, 568, 569: n = A,T,C or G
gttttgtttgtaagatgatcacagtcatgttacactgatctaaaggacatatatataaccctttaaaaaaaaaatcactgcctcattcttatttcaagatgaatttctatacagactagatgtttttctgaagatcaattagacattttgaaaatgatttaaagtgttttccttaatgttctctgaaaacaagtttcttttgtagttttaaccaaaaaagtgccctttttgtcactggattctcctagcattcatgatttttttttcatacaatgaaattaaaattgctaaaatcatggactggctttctggttggatttcaggtaagatgtgtttaaggccagagcttttctcagtatttgatttttttccccaatatttgattttttaaaaatatacacatnggtgctgcatttatatctgctggtttaaaattctgtcatatttcacttctagccttttagttatggcaaatcatattttacttttacttaaagcatttggtnatttggantatctggttctannctaaaaaaantaattctatnaattgaanttttggtactcnnccatatttggatcc

SEQ ID NO: 101 - DNA, 592 bp, Homo sapiens
  misc_feature 218, 497, 502, 533, 544, 546, 548, 550, 555: n = A,T,C or G
gtggagacgtacaaagagcagccgctcaagacacctgggaagaaaaagaaaggcaagcccgggaaacgcaaggagcaggaaaagaaaaaacggcgaactcgctctgcctggttagactctggagtgactgggagtgggctagaaggggaccacctgtctgacacctccacaacgtcgctggagctcgattcacggaggcattgaaattttcagcaganaccttccaaggacatattgcaggattctgtaatagtgaacatatggaaagtattagaaatatttattgtctgtaaatactgtaaatgcattggaataaaactgtctcccccattgctctatgaaactgcacattggtcattgtgaatatttttttttttgccaaggctaatccaattattattatcacatttaccataatttattttgtccattgatgtatttattttgtaaatgtatcttggtgctgctgaatttctatattttttgtacataatgcntttanatatacctatcaagtttgttgataaatgacncaatgaagtgncncnanttggnggttgaatttaatgaatgcctaattttattatcccaa

SEQ ID NO: 102 - DNA, 587 bp, Homo sapiens
  misc_feature 91, 131, 256, 263, 332, 392, 400, 403, 461, 496, 497, 499,510, 511, 518, 519, 539, 554, 560, 576: n = A,T,C or G
cgtcctaagcacttagactacatcagggaagaacacagaccacatccctgtcctcatgcggcttatgttttctggaagaaagtggagaccnagtccttggctttagggctccccggctgggggctgtgcantccggtcagggcgggaagggaaatgcaccgctgcatgtgaacttacagcccaggcggatgccccttcccttagcactacctggcctcctgcatcccctcgcctcatgttcctcccaccttcaaanaatgaanaaccccatgggcccagccccttgccctggggaaccaaggcagccttccaaaactcaggggctgaagcanactattagggcaggggctgactttgggtgacactgcccattccctctcagggcagctcangtcacccnggnctcttgaacccagcctgttcctttgaaaaagggcaaaactgaaaagggcttttcctanaaaaagaaaaaccagggaactttgccagggcttcnntnttaccaaaacnncttctcnnggatttttaattccccattnggcctccacttaccnggggcnatgccccaaaattaanaatttcccatc

SEQ ID NO: 103 - DNA, 496 bp, Homo sapiens
  misc_feature 2, 17, 66, 74, 82, 119, 164, 166, 172, 200, 203, 228, 232,271, 273, 415, 423, 445, 446, 473: n = A,T,C or G
anaggactggccctacntgctctctctcgtcctacctatcaatgcccaacatggcagaacctgcancccttggncactgcanatggaaacctctcagtgtcttgacatcaccctacccntgcggtgggtctccaccacaaccactttgactctgtggtccctgnanggtggnttctcctgactggcaggatggaccttanccnacatatccctctgttccctctgctnaganaaagaattcccttaacatgatataatccacccatgcaantngctactggcccagctaccatttaccatttgcctacagaatttcattcagtctacactttggcattctctctggcgatagagtgtggctgggctgaccgcaaaaggtgccttacacactggcccccaccctcaaccgttgacncatcagangcttgcctcctccttctgattnncccccatgttggatatcagggtgctcnagggattggaaaagaaacaaaac

SEQ ID NO: 104 - DNA, 575 bp, Homo sapiens
  misc_feature 18, 19, 45, 68, 77, 132, 155, 174, 219, 226, 238, 259, 263,271, 273, 306, 323, 339, 363, 368, 370, 378, 381, 382, 436,440, 449, 450, 456, 481, 485, 496, 503, 510, 512, 515, 528,542, 552: n = A,T,C or G
gcacctgctctcaatccnnctctcaccatgatcctccgcctgcanaaactcctctgccaactatggangtggtttcnggggtggctcttgccaactgggaagaagccgtggtgtctctacctgttcaactcngtttgtgtctgggggatcaactnggggctatggaagcggctnaactgttgttttggtggaagggctggtaattggctttgggaagtngcttatngaagttggcctngggaagttgctattgaaagtngccntggaagtngntttggtggggggttttgctggtggcctttgttnaatttgggtgctttgtnaatggcggccccctcncctgggcaatgaaaaaaatcaccnatgcngnaaacctcnacnnaacagcctgggcttccctcacctcgaaaaaagttgctccccccccaaaaaaggncaancccctcaanntggaangttgaaaaaatcctcgaatggggancccnaaaacaaaaanccccccntttcccngnaangggggaaataccncccccccacttacnaaaacccttntaaaaaaccccccgggaaaaaaa

SEQ ID NO: 105 - DNA, 619 bp, Homo sapiens
  misc_feature 260, 527, 560, 564, 566, 585, 599: n = A,T,C or G
cactagtaggatagaaacactgtgtcccgagagtaaggagagaagctactattgattagagcctaacccaggttaactgcaagaagaggcgggatactttcagctttccatgtaactgtatgcataaagccaatgtagtccagtttctaagatcatgttccaagctaactgaatcccacttcaatacacactcatgaactcctgatggaacaataacaggcccaagcctgtggtatgatgtgcacacttgctagactcanaaaaaatactactctcataaatgggtgggagtattttggtgacaacctactttgcttggctgagtgaaggaatgatattcatatattcatttattccatggacatttagttagtgctttttatataccaggcatgatgctgagtgacactcttgtgtatatttccaaatttttgtacagtcgctgcacatatttgaaatcatatattaagacttccaaaaaatgaagtccctggtttttcatggcaacttgatcagtaaaggattcncctctgtttggtacttaaaacatctactatatngttnanatgaaattccttttccccncctcccgaaaaaanaaagtggtggggaaaaaaaa

SEQ ID NO: 106 - DNA, 506 bp, Homo sapiens
  misc_feature 8, 21, 31, 32, 58, 75, 89, 96, 99, 103, 122, 126, 147, 150,158, 195, 210, 212, 219, 226, 246, 248, 249, 255, 258, 261,263, 265, 275, 304, 317, 321, 331, 337, 340, 358, 371, 377,380, 396, 450, 491: n = A,T,C or G
cattggtnctttcatttgctntggaagtgtnnatctctaacagtggacaaagttcccngtgccttaaactctgtnacacttttgggaantgaaaanttngtantatgataggttattctgangtanagatgttctggataccattanatntgcccccngtgtcagaggctcatattgtgttatgtaaatggtatntcattcgctactatnantcaattngaaatanggtctttgggttatgaatantnngcagcncanctnanangctgtctgtngtattcattgtggtcatagcacctcacancattgtaacctcnatcnagtgagacanactagnaanttcctagtgatggctcangattccaaatggnctcatntcnaatgtttaaaagttanttaagtgtaagaaatacagactggatgttccaccaactagtacctgtaatgacnggcctgtcccaacacatctcccttttccatgactgtggtancccgcatcggaaaaa

SEQ ID NO: 107 - DNA, 452 bp, Homo sapiens
  misc_feature 289, 317, 378: n = A,T,C or G
gttgagtctgtactaaacagtaagatatctcaatgaaccataaattcaactttgtaaaaatcttttgaagcatagataatattgtttggtaaatgtttcttttgtttggtaaatgtttcttttaaagaccctcctattctataaaactctgcatgtagaggcttgtttacctttctctctctaaggtttacaataggagtggtgatttgaaaaatataaaattatgagattggttttcctgtggcataaattgcatcactgtatcattttcttttttaaccggtaagantttcagtttgttggaaagtaactgtganaacccagtttcccgtccatctcccttagggactacccatagaacatgaaaaggtccccacngaagcaagaagataagtctttcatggctgctggttgcttaaaccactttaaaaccaaaaaattccccttggaaa

SEQ ID NO: 108 - DNA, 502 bp, Homo sapiens
  misc_feature 22, 31, 126, 168, 183, 205, 219, 231, 236, 259, 283, 295,296, 298, 301, 340, 354, 378, 383, 409, 433, 446, 455, 466,488: n = A,T,C or G
atcttcttcccttaattagttnttatttatntattaaattttattgcatgtcctggcaaacaaaaagagattgtagattggcttctggctccccaaaagcccataacagaaagtaccacaagaccncaactgaagcttaaaaaatctatcacatgtataatacctttngaagaacattaatanagcatataaaacttttaacatntgcttaatgttgtncaattataaaantaatngaaaaaaatgtccctttaacatncaatatcccacatagtgttatttnaggggattaccnngnaanaaaaaaagggtagaagggatttaatgaaaactctgcttnccatttctgtttanaaacgtctccagaacaaaaacttntcaantctttcagctaaccgcatttgagctnaggccactcaaaaactccattagncccactttctaanggtctctanagcttactaanccttttgaccccttaccctggntactcctgccctca

SEQ ID NO: 109 - DNA, 1308 bp, Homo sapiens
acccgaggtctcgctaaaatcatcatggattcacttggcgccgtcagcactcgacttgggtttgatcttttcaaagagctgaagaaaacaaatgatggcaacatcttcttttcccctgtgggcatcttgactgcaattggcatggtcctcctggggacccgaggagccaccgcttcccagttggaggaggtgtttcactctgaaaaagagacgaagagctcaagaataaaggctgaagaaaaagaggtgattgagaacacagaagcagtacatcaacaattccaaaagtttttgactgaaataagcaaactcactaatgattatgaactgaacataaccaacaggctgtttggagaaaaaacatacctcttccttcaaaaatacttagattatgttgaaaaatattatcatgcatctctggaacctgttgattttgtaaatgcagccgatgaaagtcgaaagaagattaattcctgggttgaaagcaaaacaaatgaaaaaatcaaggacttgttcccagatggctctattagtagctctaccaagctggtgctggtgaacatggtttattttaaagggcaatgggacagggagtttaagaaagaaaatactaaggaagagaaattttggatgaataagagcacaagtaaatctgtacagatgatgacacagagccattcctttagcttcactttcctggaggacttgcaggccaaaattctagggattccatataaaaacaacgacctaagcatgtttgtgcttctgcccaacgacatcgatggcctggagaagataatagataaaataagtcctgagaaattggtagagtggactagtccagggcatatggaagaaagaaaggtgaatctgcacttgccccggtttgaggtggaggacagttacgatctagaggcggtcctggctgccatggggatgggcgatgccttcagtgagcacaaagccgactactcgggaatgtcgtcaggctccgggttgtacgcccagaagttcctgcacagttcctttgtggcagtaactgaggaaggcaccgaggctgcagctgccactggcataggctttactgtcacatccgccccaggtcatgaaaatgttcactgcaatcatcccttcctgttcttcatcaggcacaatgaatccaacagcatcctcttcttcggcagattttcttctccttaagatgatcgttgccatggcattgctgcttttagcaaaaaacaactaccagtgttactcatatgattatgaaaatcgtccattcttttaaatggtggctcacttgcattt

SEQ ID NO: 110 - protein, 391 aa, Homo sapiens [sequence omitted]

SEQ ID NO: 111 - DNA, 1419 bp, Homo sapiens
ggagaactataaattaaggatcccagctacttaattgacttatgcttcctagttcgttgcccagccaccaccgtctctccaaaaacccgaggtctcgctaaaatcatcatggattcacttggcgccgtcagcactcgacttgggtttgatcttttcaaagagctgaagaaaacaaatgatggcaacatcttcttttcccctgtgggcatcttgactgcaattggcatggtcctcctggggacccgaggagccaccgcttcccagttggaggaggtgtttcactctgaaaaagagacgaagagctcaagaataaaggctgaagaaaaagaggtggtaagaataaaggctgaaggaaaagagattgagaacacagaagcagtacatcaacaattccaaaagtttttgactgaaataagcaaactcactaatgattatgaactgaacataaccaacaggctgtttggagaaaaaacatacctcttccttcaaaaatacttagattatgttgaaaaatattatcatgcatctctggaacctgttgattttgtaaatgcagccgatgaaagtcgaaagaagattaattcctgggttgaaagcaaaacaaatgaaaaaatcaaggacttgttcccagatggctctattagtagctctaccaagctggtgctggtgaacatggtttattttaaagggcaatgggacagggagtttaagaaagaaaatactaaggaagagaaattttggatgaataagagcacaagtaaatctgtacagatgatgacacagagccattcctttagcttcactttcctggaggacttgcaggccaaaattctagggattccatataaaaacaacgacctaagcatgtttgtgcttctgcccaacgacatcgatggcctggagaagataatagataaaataagtcctgagaaattggtagagtggactagtccagggcatatggaagaaagaaaggtgaatctgcacttgccccggtttgaggtggaggacagttacgatctagaggcggtcctggctgccatggggatgggcgatgccttcagtgagcacaaagccgactactcgggaatgtcgtcaggctccgggttgtacgcccagaagttcctgcacagttcctttgtggcagtaactgaggaaggcaccgaggctgcagctgccactggcataggctttactgtcacatccgccccaggtcatgaaaatgttcactgcaatcatcccttcctgttcttcatcaggcacaatgaatccaacagcatcctcttcttcggcagattttcttctccttaagatgatcgttgccatggcattgctgcttttagcaaaaaacaactaccagtgttactcatatgattatgaaaatcgtccattcttttaaatggtggctcacttgcattt

SEQ ID NO: 112 - protein, 400 aa, Homo sapiens [sequence omitted]

SEQ ID NO: 113 - DNA, 957 bp, Homo sapiens
ctcgaccttctctgcacagcggatgaaccctgagcagctgaagaccagaaaagccactatgactttctgcttaattcaggagcttacaggattcttcaaagagtgtgtccagcatcctttgaaacatgagttcttaccagcagaagcagacctttaccccaccacctcagcttcaacagcagcaggtgaaacaacccagccagcctccacctcaggaaatatttgttcccacaaccaaggagccatgccactcaaaggttccacaacctggaaacacaaagattccagagccaggctgtaccaaggtccctgagccaggctgtaccaaggtccctgagccaggttgtaccaaggtccctgagccaggatgtaccaaggtccctgagccaggttgtaccaaggtccctgagccaggctacaccaaggtccctgagccaggcagcatcaaggtccctgaccaaggcttcatcaagtttcctgagccaggtgccatcaaagttcctgagcaaggatacaccaaagttcctgtgccaggctacacaaaggtaccagagccatgtccttcaacggtcactccaggcccagctcagcagaagaccaagcagaagtaatttggtgcacagacaagcccttgagaagccaaccaccagatgctggacaccctcttcccatctgtttctgtgtcttaattgtctgtagaccttgtaatcagtacattctcaccccaagccatagtctctctcttatttgtatcctaaaaatacggtactataaagcttttgttcacacacactctgaagaatcctgtaagcccctgaattaagcagaaagtcttcatggcttttctggtcttcggctgctcagggttcatctgaagattcgaatgaaaagaaatgcatgtttcctgctctgccctcattaaattgcttttaattccaaaaaaaaaaaaaaaaaaaa

SEQ ID NO: 114 - protein, 161 aa, Homo sapiens
MSSYQQKQTFTPPPQLQQQQVKQPSQPPPQEIFVPTTKEPCHSKVPQPGNTKIPEPGCTKVPEPGCTKVPEPGCTKVPEPGCTKVPEPGCTKVPEPGYTKVPEPGSIKVPDQGFIKFPEPGAIKVPEQGYTKVPVPGYTKVPEPCPSTVTPGPAQQKTKQK

SEQ ID NO: 115 - DNA, 506 bp, Homo sapiens; identical to SEQ ID NO: 106
  misc_feature 8, 21, 31, 32, 58, 75, 89, 96, 99, 103, 122, 126, 147, 150,158, 195, 210, 212, 219, 226, 246, 248, 249, 255, 258, 261,263, 265, 275, 304, 317, 321, 331, 337, 340, 358, 371, 377,380, 396, 450, 491: n = A,T,C or G

SEQ ID NO: 116 - DNA, 3079 bp, Homo sapiens
ggatccccgggtttcctaaaccccccacagagtcctgcccaggccaaagagcaaggaaaaggtcaaagggcagaaaaaatgctgagttaggaggagctatggaaggataaacctggccttaaagaggtcaaagtggtttatagggggcgctgagggcttcccacattctctggcctaaaccttgcaggcagatctgcccagtgggctctgggatagctgtgccttccctaacaaaaaaattgtgcacaaaaggatgaaactctattttccctctagcacataaccaagaatataaggctacagattgcctttcccagagggaaaaccctgcagcaacctgctgcctggaaaagtgtaagagcagatcactggggaatcgtttgccccccgctgatggacagcttccccaagctccaagggcaggtgctcagcatgtaccgtactgggatggttgtcaatactcctggtcctgtaagagtcccaggacactgccatgccaatgccccctcagttcctggcatcctttttgggctgctcacagccccagcctctatggtgaagacatacttgctagcagcgtcaccaacttgttgccaagagatcagtgctcgaaggcaaggttatttctaactgagcagagcctgccaggaagaaagcgtttgcaccccacaccactgtgcaggtgtgaccggtgagctcacagctgccccccaggcatgcccagcccacttaatcatcacagctcgacagctctctcgcccagcccagttctggaagggataaaaaggggcatcaccgttcctgggtaacagagccaccttctgcgtcctgctgagctctgttctctccagcacctcccaacccactagtgcctggttctcttgctccaccaggaacaagccaccatgtctcgccagtcaagtgtgtcttccggagcggggggcagtcgtagcttcagcaccgcctctgccatcaccccgtctgtctcccgcaccagcttcacctccgtgtcccggtccgggggtggcggtggtggtggcttcggcagggtcagccttgcgggtgcttgtggagtgggtggctatggcagccggagcctctacaacctggggggctccaagaggatatccatcagcactagtggtggcagcttcaggaaccggtttggtgctggtgctggaggcggctatggctttggaggtggtgccggtagtggatttggtttcggcggtggagctggtggtggctttgggctcggtggcggagctggctttggaggtggcttcggtggccctggctttcctgtctgccctcctggaggtatccaagaggtcactgtcaaccagagtctcctgactcccctcaacctgcaaatcgaccccagcatccagagggtgaggaccgaggagcgcgagcagatcaagaccctcaacaataagtttgcctccttcatcgacaaggtgcggttcctggagcagcagaacaaggttctggaaacaaagtggaccctgctgcaggagcagggcaccaagactgtgaggcagaacctggagccgttgttcgagcagtacatcaacaacctcaggaggcagctggacagcatcgtgggggaacggggccgcctggactcagagctgagaaacatgcaggacctggtggaagacttcaagaacaagtatgaggatgaaatcaacaagcgtaccactgctgagaatgagtttgtgatgctgaagaaggatgtagatgctgcctacatgaacaaggtggagctggaggccaaggttgatgcactgatggatgagattaacttcatgaagatgttctttgatgcggagctgtcccagatgcagacgcatgtctctgacacctcagtggtcctctccatggacaacaaccgcaacctggacctggatagcatcatcgctgaggtcaaggcccagtatgaggagattgccaaccgcagccggacagaagccgagtcctggtatcagaccaagtatgaggagctgcagcagacagctggccggcatggcgatgacctccgcaacaccaagcatgagatctctgagatgaaccggatgatccagaggctgagagccgagattgacaatgtcaagaaacagtgcgccaatctgcagaacgccattgcggatgccgagcagcgtggggagctggccctcaaggatgccaggaacaagctggccgagctggaggaggccctgcagaaggccaagcaggacatggcccggctgctgcgtgagtaccaggagctcatgaacaccaagctggccctggacgtggagatcgccacttaccgcaagctgctggagggcgaggaatgcagactcagtggagaaggagttggaccagtcaacatctctgttgtcacaagcagtgtttcctctggatatggcagtggcagtggctatggcggtggcctcggtggaggtcttggcggcggcctcggtggaggtcttgccggaggtagcagtggaagctactactccagcagcagtgggggtgtcggcctaggtggtgggctcagtgtggggggctctggcttcagtgcaagcagtagccgagggctgggggtgggctttggcagtggcgggggtagcagctccagcgtcaaatttgtctccaccacctcctcctcccggaagagcttcaagagctaagaacctgctgcaagtcactgccttccaagtgcagcaacccagcccatggagattgcctcttctaggcagttgctcaagccatgttttatccttttctggagagtagtctagaccaagccaattgcagaaccacattctttggttcccaggagagccccattcccagcccctggtctcccgtgccgcagttctatattctgcttcaaatcagccttcaggtttcccacagcatggcccctgctgacacgagaacccaaagttttcccaaatctaaatcatcaaaacagaatccccaccccaatcccaaattttgttttggttctaactacctccagaatgtgttcaataaaatgttttataatataagctggtgtgcagaattgttttttttttctacccaa

SEQ ID NO: 117 - DNA, 6921 bp, Homo sapiens
gaattctgactgtccactcaaaacttctattccgatcaaagctatctgtgactacagacaaattgagataaccatttacaaagacgatgaatgtgttttggcgaataactctcatcgtgctaaatggaaggtcattagtcctactgggaatgaggctatggtcccatctgtgtgcttcaccgttcctccaccaaacaaagaagcggtggaccttgccaacagaattgagcaacagtatcagaatgtcctgactctttggcatgagtctcacataaacatgaagagtgtagtatcctggcattatctcatcaatgaaattgatagaattcgagctagcaatgtggcttcaataaagacaatgctacctggtgaacatcagcaagttctaagtaatctacaatctcgttttgaagattttctggaagatagccaggaatcccaagtcttttcaggctcagatataacacaactggaaaaggaggttaatgtatgtaagcagtattatcaagaacttcttaaatctgcagaaagagaggagcaagaggaatcagtttataatctctacatctctgaagttcgaaacattagacttcggttagagaactgtgaagatcggctgattagacagattcgaactcccctggaaagagatgatttgcatgaaagtgtgttcagaatcacagaacaggagaaactaaagaaagagctggaacgacttaaagatgatttgggaacaatcacaaataagtgtgaggagtttttcagtcaagcagcagcctcttcatcagtccctaccctacgatcagagcttaatgtggtccttcagaacatgaaccaagtctattctatgtcttccacttacatagataagttgaaaactgttaacttggtgttaaaaaacactcaagctgcagaagccctcgtaaaactctatgaaactaaactgtgtgaagaagaagcagttatagctgacaagaataatattgagaatctaataagtactttaaagcaatggagatctgaagtagatgaaaagagacaggtattccatgccttagaggatgagttgcagaaagctaaagccatcagtgatgaaatgtttaaaacgtataaagaacgggaccttgattttgactggcacaaagaaaaagcagatcaattagttgaaaggtggcaaaatgttcatgtgcagattgacaacaggttacgggacttagagggcattggcaaatcactgaagtactacagagacacttaccatcctttagatgattggatccagcaggttgaaactactcagagaaagattcaggaaaatcagcctgaaaatagtaaaaccctagccacacagttgaatcaacagaagatgctggtgtccgaaatagaaatgaaacagagcaaaatggacgagtgtcaaaaatatgcagaacagtactcagctacagtgaaggactatgaattacaaacaatgacctaccgggccatggtagattcacaacaaaaatctccagtgaaacgccgaagaatgcagagttcagcagatctcattattcaagagttcatggacctaaggactcgatatactgccctggtcactctcatgacacaatatattaaatttgctggtgattcattgaagaggctggaagaggaggagattaaaaggtgtaaggagacttctgaacatggggcatattcagatctgcttcagcgtcagaaggcaacagtgcttgagaatagcaaacttacaggaaagataagtgagttggaaagaatggtagctgaactaaagaaacaaaagtcccgagtagaggaagaacttccgaaggtcagggaggctgcagaaaatgaattgagaaagcagcagagaaatgtagaagatatctctctgcagaagataagggctgaaagtgaagccaagcagtaccgcagggaacttgaaaccattgtgagagagaaggaagccgctgaaagagaactggagcgggtgaggcagctcaccatagaggccgaggctaaaagagctgccgtggaagagaacctcctgaattttcgcaatcagttggaggaaaacacctttaccagacgaacactggaagatcatcttaaaagaaaagatttaagtctcaatgatttggagcaacaaaaaaataaattaatggaagaattaagaagaaagagagacaatgaggaagaactcttgaagctgataaagcagatggaaaaagaccttgcatttcagaaacaggtagcagagaaacagttgaaagaaaagcagaaaattgaattggaagcaagaagaaaaataactgaaattcagtatacatgtagagaaaatgcattgccagtgtgtccgatcacacaggctacatcatgcagggcagtaacgggtctccagcaagaacatgacaagcagaaagcagaagaactcaaacagcaggtagatgaactaacagctgccaatagaaaggctgaacaagacatgagagagctgacatatgaacttaatgccctccagcttgaaaaaacgtcatctgaggaaaaggctcgtttgctaaaagataaactagatgaaacaaataatacactcagatgccttaagttggagctggaaaggaaggatcaggcggagaaagggtattctcaacaactcagagagcttggtaggcaattgaatcaaaccacaggtaaagctgaagaagccatgcaagaagctagtgatctcaagaaaataaagcgcaattatcagttagaattagaatctcttaatcatgaaaaagggaaactacaaagagaagtagacagaatcacaagggcacatgctgtagctgagaagaatattcagcatttaaattcacaaattcattcttttcgagatgagaaagaattagaaagactacaaatctgccagagaaaatcagatcatctaaaagaacaatttgagaaaagccatgagcagttgcttcaaaatatcaaagctgaaaaagaaaataatgataaaatccaaaggctcaatgaagaattggagaaaagtaatgagtgtgcagagatgctaaaacaaaaagtagaggagcttactaggcagaataatgaaaccaaattaatgatgcagagaattcaggcagaatcagagaatatagttttagagaaacaaactatccagcaaagatgtgaagcactgaaaattcaggcagatggttttaaagatcagctacgcagcacaaatgaacacttgcataaacagacaaaaacagagcaggattttcaaagaaaaattaaatgcctagaagaagacctggcgaaaagtcaaaatttggtaagtgaatttaagcaaaagtgtgaccaacagaacattatcatccagaataccaagaaagaagttagaaatctgaatgcggaactgaatgcttccaaagaagagaagcgacgcggggagcagaaagttcagctacaacaagctcaggtgcaagagttaaataacaggttgaaaaaagtacaagacgaattacacttaaagaccatagaggagcagatgacccacagaaagatggttctgtttcaggaagaatctggtaaattcaaacaatcagcagaggagtttcggaagaagatggaaaaattaatggagtccaaagtcatcactgaaaatgatatttcaggcattaggcttgactttgtgtctcttcaacaagaaaactctagagcccaagaaaatgctaagctttgtgaaacaaacattaaagaacttgaaagacagcttcaacagtatcgtgaacaaatgcagcaagggcagcacatggaagcaaatcattaccaaaaatgtcagaaacttgaggatgagctgatagcccagaagcgtgaggttgaaaacctgaagcaaaaaatggaccaacagatcaaagagcatgaacatcaattagttttgctccagtgtgaaattcaaaaaaagagcacagccaaagactgtaccttcaaaccagattttgagatgacagtgaaggagtgccagcactctggagagctgtcctctagaaacactggacaccttcacccaacacccagatcccctctgttgagatggactcaagaaccacagccattggaagagaagtggcagcatcgggttgttgaacagatacccaaagaagtccaattccagccaccaggggctccactcgagaaagagaaaagccagcagtgttactctgagtacttttctcagacaagcaccgagttacagataacttttgatgagacaaaccccattacaagactgtctgaaattgagaagataagagaccaagccctgaacaattctagaccacctgttaggtatcaagataacgcatgtgaaatggaactggtgaaggttttgacacccttagagatagctaagaacaagcagtatgatatgcatacagaagtcacaacattaaaacaagaaaagaacccagttcccagtgctgaagaatggatgcttgaagggtgcagagcatctggtggactcaagaaaggggatttccttaagaagggcttagaaccagagaccttccagaactttgatggtgatcatgcatgttcagtcagggatgatgaatttaaattccaagggcttaggcacactgtgactgccaggcagttggtggaagctaagcttctggacatgagaacaattgagcagctgcgactcggtcttaagactgttgaagaagttcagaaaactcttaacaagtttctgacgaaagccacctcaattgcagggctttacctagaatctacaaaagaaaagatttcatttgcctcagcggccgagagaatcataatagacaaaatggtggctttggcatttttagaagctcaggctgcaacaggttttataattgatcccatttcaggtcagacatattctgttgaagatgcagttcttaaaggagttgttgaccccgaattcagaattaggcttcttgaggcagagaaggcagctgtgggatattcttattcttctaagacattgtcagtgtttcaagctatggaaaatagaatgcttgacagacaaaaaggtaaacatatcttggaagcccagattgccagtgggggtgtcattgaccctgtgagaggcattcgtgttcctccagaaattgctctgcagcaggggttgttgaataatgccatcttacagtttttacatgagccatccagcaacacaagagttttccctaatcccaataacaagcaagctctgtattactcagaattactgcgaatgtgtgtatttgatgtagagtcccaatgctttctgtttccatttggggagaggaacatttccaatctcaatgtcaagaaaacacatagaatttctgtagtagatactaaaacaggatcagaattgaccgtgtatgaggctttccagagaaacctgattgagaaaagtatatatcttgaactttcagggcagcaatatcagtggaaggaagctatgttttttgaatcctatgggcattcttctcatatgctgactgatactaaaacaggattacacttcaatattaatgaggctatagagcagggaacaattgacaaagccttggtcaaaaagtatcaggaaggcctcatcacacttacagaacttgctgattctttgctgagccggttagtccccaagaaagatttgcacagtcctgttgcagggtattggctgactgctagtggggaaaggatctctgtactaaaagcctcccgtagaaatttggttgatcggattactgccctccgatgccttgaagcccaagtcagtacagggggcataattgatcctcttactggcaaaaagtaccgggtggccgaagctttgcatagaggcctggttgatgaggggtttgcccagcagctgcgacagtgtgaattagtaatcacagggattggccatcccatcactaacaaaatgatgtcagtggtggaagctgtgaatgcaaatattataaataaggaaatgggaatccgatgtttggaatttcagtacttgacaggagggttgatagagccacaggttcactctcggttatcaatagaagaggctctccaagtaggtattatagatgtcctcattgccacaaaactcaaagatcaaaagtcatatgtcagaaatataatatgccctcagacaaaaagaaagttgacatataaagaagccttagaaaaagctgattttgatttccacacaggacttaaactgttagaagtatctgagcccctgatgacaggaatttctagcctctactattcttcctaatgggacatgtttaaataactgtgcaaggggtgatgcaggctggttcatgccactttttcagagtatgatgatatcggctacatatgcagtctgtgaattatgtaacatactctatttcttgagggctgcaaattgctaagtgctcaaaatagagtaagttttaaattgaaaattacataagatttaatgcccttcaaatggtttcatttagccttgagaatggttttttgaaacttggccacactaaaatgtttttttttttttacgtagaatgtgggataaacttgatgaactccaagttcacagtgtcatttcttcagaactccccttcattgaatagtgatcatttattaaatgataaattgcactcgctgaaagagcacgtcatgaagcaccatggaatcaaagagaaagatataaattcgttcccacagccttcaagctgcagtgttttagattgcttcaaaaaatgaaaaagttttgcctttttcgatatagtgaccttctttgcatattaaaatgtttaccacaatgtcccatttctagttaagtcttcgcacttgaaagctaacattatgaatattatgtgttggaggaggggaaggattttcttcattctgtgtattttccgg

SEQ ID NO: 118 - DNA, 946 bp, Homo sapiens
cttctgactgggctcaggctgacaggtagagctcaccatggcttcttgtgtccttgtcccctccccatcacagctgtggtgcagtccaccgtctccagtggctatggcggtgccagtggtgtcggcagtggcttaggcctgggtggaggaagcagctactcctatggcagtggtcttggcgttggaggtggcttcagttccagcagtggcagagccattgggggtggcctcagctctgttggaggcggcagttccaccatcaagtacaccaccacctcctcctccagcaggaagagctataagcactaaagtgcgtctgctagctctcggtcccacagtcctcaggcccctctctggctgcagagccctctcctcaggttgcctgtcctctcctggcctccagtctcccctgctgtcccaggtagagctggggatgaatgcttagtgccctcacttcttctctctctctctataccatctgagcacccattgctcaccatcagatcaacctctgattttacatcatgatgtaatcaccactggagcttcactgttactaaattattaatttcttgcctccagtgttctatctctgaggctgagcattataagaaaatgacctctgctccttttcattgcagaaaattgccaggggcttatttcagaacaacttccacttactttccactggctctcaaactctctaacttataagtgttgtgaacccccacccaggcagtatccatgaaagcacaagtgactagtcctatgatgtacaaagcctgtatctctgtgatgatttctgtgctcttcactgtttgcaattgctaaataaagcagatttataatacatatattcttttactttgccttgctttggggccaaagttttgggcttaaacttttttatctgataagtgaatagttgtttttaaaagataatcta

SEQ ID NO: 119 - DNA, 8948 bp, Homo sapiens
tcaacagcccctgctccttgggcccctccatgccatgccgtaatctctcccacccgaccaacaccaacacccagctccgacgcagctcctctgcgcccttgccgccctccgagccacagctttcctcccgctcctgcccccggcccgtcgccgtctccgcgctcgcagcggcctcgggagggcccaggtagcgagcagcgacctcgcgagccttccgcactcccgcccggttccccggccgtccgcctatccttggccccctccgctttctccgcgccggcccgcctcgcttatgcctcggcgctgagccgctctcccgattgcccgccgacatgagctgcaacggaggctcccacccgcggatcaacactctgggccgcatgatccgcgccgagtctggcccggacctgcgctacgaggtgaccagcggcggcgggggcaccagcaggatgtactattctcggcgcggcgtgatcaccgaccagaactcggacggctactgtcaaaccggcacgatgtccaggcaccagaaccagaacaccatccaggagctgctgcagaactgctccgactgcttgatgcgagcagagctcatcgtgcagcctgaattgaagtatggagatggaatacaactgactcggagtcgagaattggatgagtgttttgcccaggccaatgaccaaatggaaatcctcgacagcttgatcagagagatgcggcagatgggccagccctgtgatgcttaccagaaaaggcttcttcagctccaagagcaaatgcgagccctttataaagccatcagtgtccctcgagtccgcagggccagctccaagggtggtggaggctacacttgtcagagtggctctggctgggatgagttcaccaaacatgtcaccagtgaatgtttggggtggatgaggcagcaaagggcggagatggacatggtggcctggggtgtggacctggcctcagtggagcagcacattaacagccaccggggcatccacaactccatcggcgactatcgctggcagctggacaaaatcaaagccgacctgcgcgagaaatctgcgatctaccagttggaggaggagtatgaaaacctgctgaaagcgtcctttgagaggatggatcacctgcgacagctgcagaacatcattcaggccacgtccagggagatcatgtggatcaatgactgcgaggaggaggagctgctgtacgactggagcgacaagaacaccaacatcgctcagaaacaggaggccttctccatacgcatgagtcaactggaagttaaagaaaaagagctcaataagctgaaacaagaaagtgaccaacttgtcctcaatcagcatccagcttcagacaaaattgaggcctatatggacactctgcagacgcagtggagttggattcttcagatcaccaagtgcattgatgttcatctgaaagaaaatgctgcctactttcagttttttgaagaggcgcagtctactgaagcatacctgaaggggctccaggactccatcaggaagaagtacccctgcgacaagaacatgcccctgcagcacctgctggaacagatcaaggagctggagaaagaacgagagaaaatccttgaatacaagcgtcaggtgcagaacttggtaaacaagtctaagaagattgtacagctgaagcctcgtaacccagactacagaagcaataaacccattattctcagagctctctgtgactacaaacaagatcagaaaatcgtgcataagggggatgagtgtatcctgaaggacaacaacgagcgcagcaagtggtacgtgacgggcccgggaggcgttgacatgcttgttccctctgtggggctgatcatccctcctccgaacccactggccgtggacctctcttgcaagattgagcagtactacgaagccatcttggctctgtggaaccagctctacatcaacatgaagagcctggtgtcctggcactactgcatgattgacatagagaagatcagggccatgacaatcgccaagctgaaaacaatgcggcaggaagattacatgaagacgatagccgaccttgagttacattaccaagagttcatcagaaatagccaaggctcagagatgtttggagatgatgacaagcggaaaatacagtctcagttcaccgatgcccagaagcattaccagaccctggtcattcagctccctggctatccccagcaccagacagtgaccacaactgaaatcactcatcatggaacctgccaagatgtcaaccataataaagtaattgaaaccaacagagaaaatgacaagcaagaaacatggatgctgatggagctgcagaagattcgcaggcagatagagcactgcgagggcaggatgactctcaaaaacctccctctagcagaccaggggtcttctcaccacatcacagtgaaaattaacgagcttaagagtgtgcagaatgattcacaagcaattgctgaggttctcaaccagcttaaagatatgcttgccaacttcagaggttctgaaaagtactgctatttacagaatgaagtatttggactatttcagaaactggaaaatatcaatggtgttacagatggctacttaaatagcttatgcacagtaagggcactgctccaggctattctccaaacagaagacatgttaaaggtttatgaagccaggctcactgaggaggaaactgtctgcctggacctggataaagtggaagcttaccgctgtggactgaagaaaataaaaaatgacttgaacttgaagaagtcgttgttggccactatgaagacagaactacagaaagcccagcagatccactctcagacttcacagcagtatccactttatgatctggacttgggcaagttcggtgaaaaagtcacacagctgacagaccgctggcaaaggatagataaacagatcgactttagattatgggacctggagaaacaaatcaagcaattgaggaattatcgtgataactatcaggctttctgcaagtggctctatgatcgtaaacgccgccaggattccttagaatccatgaaatttggagattccaacacagtcatgcggtttttgaatgagcagaagaacttgcacagtgaaatatctggcaaacgagacaaatcagaggaagtacaaaaaattgctgaactttgcgccaattcaattaaggattatgagctccagctggcctcatacacctcaggactggaaactctgctgaacatacctatcaagaggaccatgattcagtccccttctggggtgattctgcaagaggctgcagatgttcatgctcggtacattgaactacttacaagatctggagactattacaggttcttaagtgagatgctgaagagtttggaagatctgaagctgaaaaataccaagatcgaagttttggaagaggagctcagactggcccgagatgccaactcggaaaactgtaataagaacaaattcctggatcagaacctgcagaaataccaggcagagtgttcccagttcaaagcgaagcttgcgagcctggaggagctgaagagacaggctgagctggatgggaagtcggctaagcaaaatctagacaagtgctacggccaaataaaagaactcaatgagaagatcacccgactgacttatgagattgaagatgaaaagagaagaagaaaatctgtggaagacagatttgaccaacagaagaatgactatgaccaactgcagaaagcaaggcaatgtgaaaaggagaaccttggttggcagaaattagagtctgagaaagccatcaaggagaaggagtacgagattgaaaggttgagggttctactgcaggaagaaggcacccggaagagagaatatgaaaatgagctggcaaaggtaagaaaccactataatgaggagatgagtaatttaaggaacaagtatgaaacagagattaacattacgaagaccaccatcaaggagatatccatgcaaaaagaggatgattccaaaaatcttagaaaccagcttgatagactttcaagggaaaatcgagatctgaaggatgaaattgtcaggctcaatgacagcatcttgcaggccactgagcagcgaaggcgagctgaagaaaacgcccttcagcaaaaggcctgtggctctgagataatgcagaagaagcagcatctggagatagaactgaagcaggtcatgcagcagcgctctgaggacaatgcccggcacaagcagtccctggaggaggctgccaagaccattcaggacaaaaataaggagatcgagagactcaaagctgagtttcaggaggaggccaagcgccgctgggaatatgaaaatgaactgagtaaggtaagaaacaattatgatgaggagatcattagcttaaaaaatcagtttgagaccgagatcaacatcaccaagaccaccatccaccagctcaccatgcagaaggaagaggataccagtggctaccgggctcagatagacaatctcacccgagaaaacaggagcttatctgaagaaataaagaggctgaagaacactctaacccagaccacagagaatctcaggagggtggaagaagacatccaacagcaaaaggccactggctctgaggtgtctcagaggaaacagcagctggaggttgagctgagacaagtcactcagatgcgaacagaggagagcgtaagatataagcaatctcttgatgatgctgccaaaaccatccaggataaaaacaaggagatagaaaggttaaaacaactgatcgacaaagaaacaaatgaccggaaatgcctggaagatgaaaacgcgagattacaaagggtccagtatgacctgcagaaagcaaacagtagtgcgacggagacaataaacaaactgaaggttcaggagcaagaactgacacgcctgaggatcgactatgaaagggtttcccaggagaggactgtgaaggaccaggatatcacgcggttccagaactctctgaaagagctgcagctgcagaagcagaaggtggaagaggagctgaatcggctgaagaggaccgcgtcagaagactcctgcaagaggaagaagctggaggaagagctggaaggcatgaggaggtcgctgaaggagcaagccatcaaaatcaccaacctgacccagcagctggagcaggcatccattgttaagaagaggagtgaggatgacctccggcagcagagggacgtgctggatggccacctgagggaaaagcagaggacccaggaagagctgaggaggctctcttctgaggtcgaggccctgaggcggcagttactccaggaacaggaaagtgtcaaacaagctcacttgaggaatgagcatttccagaaggcgatagaagataaaagcagaagcttaaatgaaagcaaaatagaaattgagaggctgcagtctctcacagagaacctgaccaaggagcacttgatgttagaagaagaactgcggaacctgaggctggagtacgatgacctgaggagaggacgaagcgaagcggacagtgataaaaatgcaaccatcttggaactaaggagccagctgcagatcagcaacaaccggaccctggaactgcaggggctgattaatgatttacagagagagagggaaaatttgagacaggaaattgagaaattccaaaagcaggctttagaggcatctaataggattcaggaatcaaagaatcagtgtactcaggtggtacaggaaagagagagccttctggtgaaaatcaaagtcctggagcaagacaaggcaaggctgcagaggctggaggatgagctgaatcgtgcaaaatcaactctagaggcagaaaccagggtgaaacagcgcctggagtgtgagaaacagcaaattcagaatgacctgaatcagtggaagactcaatattcccgcaaggaggaggctattaggaagatagaatcggaaagagaaaagagtgagagagagaagaacagtcttaggagtgagatcgaaagactccaagcagagatcaagagaattgaagagaggtgcaggcgtaagctggaggattctaccagggagacacagtcacagttagaaacagaacgctcccgatatcagagggagattgataaactcagacagcgcccatatgggtcccatcgagagacccagactgagtgtgagtggaccgttgacacctccaagctggtgtttgatgggctgaggaagaaggtgacagcaatgcagctctatgagtgtcagctgatcgacaaaacaaccttggacaaactattgaaggggaagaagtcagtggaagaagttgcttctgaaatccagccattccttcggggtgcaggatctatcgctggagcatctgcttctcctaaggaaaaatactctttggtagaggccaagagaaagaaattaatcagcccagaatccacagtcatgcttctggaggcccaggcagctacaggtggtataattgatccccatcggaatgagaagctgactgtcgacagtgccatagctcgggacctcattgacttcgatgaccgtcagcagatatatgcagcagaaaaagctatcactggttttgatgatccattttcaggcaagacagtatctgtttcagaagccatcaagaaaaatttgattgatagagaaaccggaatgcgcctgctggaagcccagattgcttcagggggtgtagtagaccctgtgaacagtgtctttttgccaaaagatgtcgccttggcccgggggctgattgatagagatttgtatcgatccctgaatgatccccgagatagtcagaaaaactttgtggatccagtcaccaaaaagaaggtcagttacgtgcagctgaaggaacggtgcagaatcgaaccacatactggtctgctcttgctttcagtacagaagagaagcatgtccttccaaggaatcagacaacctgtgaccgtcactgagctagtagattctggtatattgagaccgtccactgtcaatgaactggaatctggtcagatttcttatgacgaggttggtgagagaattaaggacttcctccagggttcaagctgcatagcaggcatatacaatgagaccacaaaacagaagcttggcatttatgaggccatgaaaattggcttagtccgacctggtactgctctggagttgctggaagcccaagcagctactggctttatagtggatcctgttagcaacttgaggttaccagtggaggaagcctacaagagaggtctggtgggcattgagttcaaagagaagctcctgtctgcagaacgagctgtcactgggtataatgatcctgaaacaggaaacatcatctctttgttccaagccatgaataaggaactcatcgaaaagggccacggtattcgcttattagaagcacagatcgcaaccggggggatcattgacccaaaggagagccatcgtttaccagttgacatagcatataagaggggctatttcaatgaggaactcagtgagattctctcagatccaagtgatgataccaaaggattttttgaccccaacactgaagaaaatcttacctatctgcaactaaaagaaagatgcattaaggatgaggaaacagggctctgtcttctgcctctgaaagaaaagaagaaacaggtgcagacatcacaaaagaataccctcaggaagcgtagagtggtcatagttgacccagaaaccaataaagaaatgtctgttcaggaggcctacaagaagggcctaattgattatgaaaccttcaaagaactgtgtgagcaggaatgtgaatgggaagaaataaccatcacgggatcagatggctccaccagggtggtcctggtagatagaaagacaggcagtcagtatgatattcaagatgctattgacaagggccttgttgacaggaagttctttgatcagtaccgatccggcagcctcagcctcactcaatttgctgacatgatctccttgaaaaatggtgtcggcaccagcagcagcatgggcagtggtgtcagcgatgatgtttttagcagctcccgacatgaatcagtaagtaagatttccaccatatccagcgtcaggaatttaaccataaggagcagctctttttcagacaccctggaagaatcgagccccattgcagccatctttgacacagaaaacctggagaaaatctccattacagaaggtatagagcggggcatcgttgacagcatcacgggtcagaggcttctggaggctcaggcctgcacaggtggcatcatccacccaaccacgggccagaagctgtcacttcaggacgcagtctcccagggtgtgattgaccaagacatggccaccagcgtgaagcctgctcagaaagccttcataggcttcgagggtgtgaagggaaagaagaagatgtcagcagcagaggcagtgaaagaaaaatggctcccgtatgaggctggccagcgcttcctggagttccagtacctcacgggaggtcttgttgacccggaagtgcatgggaggataagcaccgaagaagccatccggaaggggttcatagatggccgcgccgcacagaggctgcaagacaccagcagctatgccaaaatcctgacctgccccaaaaccaaattaaaaatatcctataaggatgccataaatcgctccatggtagaagatatcactgggctgcgccttctggaagccgcctccgtgtcgtccaagggcttacccagcccttacaacatgtcttcggctccggggtcccgctccggctcccgctcgggatctcgctccggatctcgctccgggtcccgcagtgggtcccggagaggaagctttgacgccacagggaattcttcctactcttattcctactcatttagcagtagttctattgggcactag

SEQ ID NO: 120 - DNA, 587 bp, Homo sapiens; identical to SEQ ID NO: 102
  misc_feature 91, 131, 256, 263, 332, 392, 400, 403, 461, 496, 497, 499,510, 511, 518, 519, 539, 554, 560, 576: n = A,T,C or G

SEQ ID NO: 121 - DNA, 619 bp, Homo sapiens; identical to SEQ ID NO: 105
  misc_feature 260, 527, 560, 564, 566, 585, 599: n = A,T,C or G

SEQ ID NO: 122 - DNA, 1475 bp, Homo sapiens
tccacctgtccccgcagcgccggctcgcgccctcctgccgcagccaccgagccgccgtctagcgccccgacctcgccaccatgagagccctgctggcgcgcctgcttctctgcgtcctggtcgtgagcgactccaaaggcagcaatgaacttcatcaagttccatcgaactgtgactgtctaaatggaggaacatgtgtgtccaacaagtacttctccaacattcactggtgcaactgcccaaagaaattcggagggcagcactgtgaaatagataagtcaaaaacctgctatgaggggaatggtcacttttaccgaggaaaggccagcactgacaccatgggccggccctgcctgccctggaactctgccactgtccttcagcaaacgtaccatgcccacagatctgatgctcttcagctgggcctggggaaacataattactgcaggaacccagacaaccggaggcgaccctggtgctatgtgcaggtgggcctaaagccgcttgtccaagagtgcatggtgcatgactgcgcagatggaaaaaagccctcctctcctccagaagaattaaaatttcagtgtggccaaaagactctgaggccccgctttaagattattgggggagaattcaccaccatcgagaaccagccctggtttgcggccatctacaggaggcaccgggggggctctgtcacctacgtgtgtggaggcagcctcatcagcccttgctgggtgatcagcgccacacactgcttcattgattacccaaagaaggaggactacatcgtctacctgggtcgctcaaggcttaactccaacacgcaaggggagatgaagtttgaggtggaaaacctcatcctacacaaggactacagcgctgacacgcttgctcaccacaacgacattgccttgctgaagatccgttccaaggagggcaggtgtgcgcagccatcccggactatacagaccatctgcctgccctcgatgtataacgatccccagtttggcacaagctgtgagatcactggctttggaaaagagaattctaccgactatctctatccggagcagctgaagatgactgttgtgaagctgatttcccaccgggagtgtcagcagccccactactacggctctgaagtcaccaccaaaatgctgtgtgctgctgacccacagtggaaaacagattcctgccagggagactcagggggacccctcgtctgttccctccaaggccgcatgactttgactggaattgtgagctggggccgtggatgtgccctgaaggacaagccaggcgtctacacgagagtctcacacttcttaccctggatccgcagtcacaccaaggaagagaatggcctggccctctgagggtccccagggaggaaacgggcaccacccgctttcttgctggttgtcatttttgcagtagagtcatctccatcagctgtaagaagagactgggaagat

SEQ ID NO: 123 - DNA, 2294 bp, Homo sapiens
cagcgccggctcgcgccctcctgccgcagccaccgagccgccgtctagcgccccgacctcgccaccatgagagccctgctggcgcgcctgcttctctgcgtcctggtcgtgagcgactccaaaggcagcaatgaacttcatcaagttccatcgaactgtgactgtctaaatggaggaacatgtgtgtccaacaagtacttctccaacattcactggtgcaactgcccaaagaaattcggagggcagcactgtgaaatagataagtcaaaaacctgctatgaggggaatggtcacttttaccgaggaaaggccagcactgacaccatgggccggccctgcctgccctggaactctgccactgtccttcagcaaacgtaccatgcccacagatctgatgctcttcagctgggcctggggaaacataattactgcaggaacccagacaaccggaggcgaccctggtgctatgtgcaggtgggcctaaagccgcttgtccaagagtgcatggtgcatgactgcgcagatggaaaaaagccctcctctcctccagaagaattaaaatttcagtgtggccaaaagactctgaggccccgctttaagattattgggggagaattcaccaccatcgagaaccagccctggtttgcggccatctacaggaggcaccgggggggctctgtcacctacgtgtgtggaggcagcctcatcagcccttgctgggtgatcagcgccacacactgcttcattgattacccaaagaaggaggactacatcgtctacctgggtcgctcaaggcttaactccaacacgcaaggggagatgaagtttgaggtggaaaacctaatcctacacaaggactacagcgctgacacgcttgctcaccacaacgacattgccttgctgaagatccgttccaaggagggcaggtgtgcgcagccatcccggactatacagaccatctgcctgccctcgatgtataacgatccccagtttggcacaagctgtgagatcactggctttggaaaagagaattctaccgactatctctatccggagcagctgaaaatgactgttgtgaagctgatttcccaccgggagtgtcagcagccccactactacggctctgaagtcaccaccaaaatgctgtgtgctgctgacccacagtggaaaacagattcctgccagggagactcagggggacccctcgtctgttccctccaaggccgcatgactttgactggaattgtgagctggggccgtggatgtgccctgaaggacaagccaggcgtctacacgagagtctcacacttcttaccctggatccgcagtcacaccaaggaagagaatggcctggccctctgagggtccccagggaggaaacgggcaccacccgctttcttgctggttgctattttgcagtagagtcatctccatcagctgtaagaagagctgggaatataggctctgcacagatggatttgcctgtgccaccaccagggcgaacgacaatagctttaccctcaggcataggcctgggtgctggctgcccagacccctctggccaggatggaggggtggtcctgactcaacatgttactgaccagcaacttgtctttttctggactgaagcctgcaggagttaaaaagggcagggcatctcctgtgcatgggctcgaagggagagccagctcccccgaccggtgggcatttgtgaggcccatggttgagaaatgaataatttcccaattaggaagtgtaagcagctgaggtctcttgagggagcttagccaatgtgggagcagcggtttggggagcagagacactaacgacttcagggcagggctctgatattccatgaatgtatcaggaaatatatatgtgtgtgtatgtttgcacacttgtgtgtgggctgtgagtgtaagtgtgagtaagagctggtgtctgattgttaagtctaaatatttccttaaactgtgtggactgtgatgccacacagagtggtctttctggagaggttataggtcactcctggggcctcttgggtcccccacgtgacagtgcctgggaatgtattattctgcagcatgacctgtgaccagcactgtctcagtttcactttcacatagatgtccctttcttggccagttatcccttccttttagcctagttcatccaatcctcactgggtggggtgaggaccactcctgtacactgaatatttatatttcactatttttatttatatttttgtaattttaaataaaagtgatcaataaaatgtgatttttctgatg

SEQ ID NO: 124 - DNA, 956 bp, Homo sapiens
gatgagttccgcaccaagtttgagacagaccaggccctgcgcctgagtgtggaggccgacatcaatggcctgcgcagggtgctggatgagctgaccctggccagagccgacctggagatgcagattgagaacctcaaggaggagctggcctacctgaagaagaaccacgaggaggagatgaacgccctgcgaggccaggtgggtggtgagatcaatgtggagatggacgctgccccaggcgtggacctgagccgcatcctcaacgagatgcgtgaccagtatgagaagatggcagagaagaaccgcaaggatgccgaggattggttcttcagcaagacagaggaactgaaccgcgaggtggccaccaacagtgagctggtgcagagtggcaagagtgagatctcggagctccggcgcaccatgcaggccttggagatagagctgcagtcccagctcagcatgaaagcatccctggagggcaacctggcggagacagagaaccgctactgcgtgcagctgtcccagatccaggggctgattggcagcgtggaggagcagctggcccagcttcgctgcgagatggagcagcagaaccaggaatacaaaatcctgctggatgtgaagacgcggctggagcaggagattgccacctaccgccgcctgctggagggagaggatgcccacctgactcagtacaagaaagaaccggtgaccacccgtcaggtgcgtaccattgtggaagaggtccaggatggcaaggtcatctcctcccgcgagcaggtccaccagaccacccgctgaggactcagctaccccggccggccacccaggaggcagggacgcagccgccccatctgccccacagtctccggcctctccagcctcagccccctgcttcagtcccttccccatgcttccttgcctgatgacaataaaagcttgttgactcagctatg

SEQ ID NO: 125 - DNA, 486 bp, Homo sapiens
  misc_feature 16: n = A,T,C or G
aaattatatatagtgnttcagctcccattgtggtgttcatagtcttctaggaacagataaacttaagtattcaattcactcttggcattttttctttaatataggctttttagcctatttttggaaaactgcttttcttctgagaaccttattctgaatgtcatcaactttaccaaaccttctaagtccagagctaacttagtactgtttaagttactattgactgaattttcttcattttctgtttagccagtgttaccaaggtaagctggggaatgaagtataccaacttctttcagagcattttaggacattatggcagctttagaaggctgtcttgtttctagccaagggagagccagcgcaggttttggatactagagaaagtcatttgcttgtactattgccattttagaaagctctgatgtgaattcaaattttacctctgttacttaaagccaacaattttaaggcagtagttttact

SEQ ID NO: 126 - DNA, 3552 bp, Homo sapiens
cggcaggcaggtctcgtctcggcaccctcccggcgcccgcgttctcctggccctgcccggcatcccgatggccgccgctgggccccggcgctccgtgcgcggagccgtctgcctgcatctgctgctgaccctcgtgatcttcagtcgtgctggtgaagcctgcaaaaaggtgatacttaatgtaccttctaaactagaggcagacaaaataattggcagagttaatttggaagagtgcttcaggtctgcagacctcatccggtcaagtgatcctgatttcagagttctaaatgatgggtcagtgtacacagccagggctgttgcgctgtctgataagaaaagatcatttaccatatggctttctgacaaaaggaaacagacacagaaagaggttactgtgctgctagaacatcagaagaaggtatcgaagacaagacacactagagaaactgttctcaggcgtgccaagaggagatgggcacctattccttgctctatgcaagagaattccttgggccctttcccattgtttcttcaacaagttgaatctgatgcagcacagaactatactgtcttctactcaataagtggacgtggagttgataaagaacctttaaatttgttttatatagaaagagacactggaaatctattttgcactcggcctgtggatcgtgaagaatatgatgtttttgatttgattgcttatgcgtcaactgcagatggatattcagcagatctgcccctcccactacccatcagggtagaggatgaaaatgacaaccaccctgttttcacagaagcaatttataattttgaagttttggaaagtagtagacctggtactacagtgggggtggtttgtgccacagacagagatgaaccggacacaatgcatacgcgcctgaaatacagcattttgcagcagacaccaaggtcacctgggctcttttctgtgcatcccagcacaggcgtaatcaccacagtctctcattatttggacagagaggttgtagacaagtactcattgataatgaaagtacaagacatggatggccagttttttggattgataggcacatcaacttgtatcataacagtaacagattcaaatgataatgcacccactttcagacaaaatgcttatgaagcatttgtagaggaaaatgcattcaatgtggaaatcttacgaatacctatagaagataaggatttaattaacactgccaattggagagtcaattttaccattttaaagggaaatgaaaatggacatttcaaaatcagcacagacaaagaaactaatgaaggtgttctttctgttgtaaagccactgaattatgaagaaaaccgtcaagtgaacctggaaattggagtaaacaatgaagcgccatttgctagagatattcccagagtgacagccttgaacagagccttggttacagttcatgtgagggatctggatgaggggcctgaatgcactcctgcagcccaatatgtgcggattaaagaaaacttagcagtggggtcaaagatcaacggctataaggcatatgaccccgaaaatagaaatggcaatggtttaaggtacaaaaaattgcatgatcctaaaggttggatcaccattgatgaaatttcagggtcaatcataacttccaaaatcctggatagggaggttgaaactcccaaaaatgagttgtataatattacagtcctggcaatagacaaagatgatagatcatgtactggaacacttgctgtgaacattgaagatgtaaatgataatccaccagaaatacttcaagaatatgtagtcatttgcaaaccaaaaatggggtataccgacattttagctgttgatcctgatgaacctgtccatggagctccattttatttcagtttgcccaatacttctccagaaatcagtagactgtggagcctcaccaaagttaatgatacagctgcccgtctttcatatcagaaaaatgctggatttcaagaatataccattcctattactgtaaaagacagggccggccaagctgcaacaaaattattgagagttaatctgtgtgaatgtactcatccaactcagtgtcgtgcgacttcaaggagtacaggagtaatacttggaaaatgggcaatccttgcaatattactgggtatagcactgctcttttctgtattgctaactttagtatgtggagtttttggtgcaactaaagggaaacgttttcctgaagatttagcacagcaaaacttaattatatcaaacacagaagcacctggagacgatagagtgtgctctgccaatggatttatgacccaaactaccaacaactctagccaaggtttttgtggtactatgggatcaggaatgaaaaatggagggcaggaaaccattgaaatgatgaaaggaggaaaccagaccttggaatcctgccggggggctgggcatcatcataccctggactcctgcaggggaggacacacggaggtggacaactgcagatacacttactcggagtggcacagttttactcaaccccgtctcggtgaaaaattgcatcgatgtaatcagaatgaagaccgcatgccatcccaagattatgtcctcacttataactatgagggaagaggatctccagctggttctgtgggctgctgcagtgaaaagcaggaagaagatggccttgactttttaaataatttggaacccaaatttattacattagcagaagcatgcacaaagagataatgtcacagtgctacaattaggtctttgtcagacattctggaggtttccaaaaataatattgtaaagttcaatttcaacatgtatgtatatgatgatttttttctcaattttgaattatgctactcaccaatttatatttttaaagcaagttgttgcttatcttttccaaaaagtgaaaaatgttaaaacagacaactggtaaatctcaaactccagcactggaattaaggtctctaaagcatctgctcttttttttttttacagatattttagtaataaatatgctggataaatattagtccaacaatagctaagttatgctaatatcacattattatgtattcactttaagtgatagtttaaaaaataaacaagaaatattgagtatcactatgtgaagaaagttttggaaaagaaacaatgaagactgaattaaattaaaaatgttgcagctcataaagaattggactcacccctactgcactaccaaattcatttgactttggaggcaaaatgtgttgaagtgccctatgaagtagcaattttctataggaatatagttggaaataaatgtgtgtgtgtatattattattaatcaatgcaatatttaaatgaaatgagaacaaagaggaaaatggtaaaaacttgaaatgaggctggggtatagtttgtcctacaatagaaaaaagagagagcttcctaggcctgggctcttaaatgctgcattataactgagtctatgaggaaatagttcctgtccaatttgtgtaatttgtttaaaattgtaaataaat

SEQ ID NO: 127 - DNA, 754 bp, Homo sapiens
ttttttttttttgtcattgttcattgattttaatgagaaagctaagagaggaaataagtagcctttcaaaggtcacacagaagtaagtgacagatccaggattcatatccaagcattctggctctagtgtccatgcttctcaaccattatgacccaatattcaaccaaatcaatactgaaggacacgtgaaatgtatccggtattttactattacaaacaaaaatccaatgaacattcttgaagacatacacaaaaataatggttacaatagaagttactggaattgaaattttggttcaacctatattaaaatgtaaggcttttgatatagctaatagatttttgaaatgatcagtcttaacgtttgtaggggagcacactcctgcatggggaaaagattcactgtgaagcacagagcacctttatggttggatcatcttgtcattaaagttcaggcgttatctatcctgtaagtggcagaatcaagactgcaatatcgcctgcttttctttttaactcatgttttcccttgactacactggtcctcaaagtaaaacccctgtgtcagtgtactattcatggaatactctgcaattataaccaccttctaatacttttaatacccaatcaaaatttattatacatatgtatcatagatactcatctgtaaagctgtgcttcaaaatagtgatctcttcccaacattacaatatatattaatgatgtcgaacctgcccgggcggccgctcgaag

SEQ ID NO: 128 - DNA, 374 bp, Homo sapiens
aggttttgattaaaaaggcaaatgattttattgttcgataatcttttaaaaaaataagaggaaggagtaaaattaaagatgaaagatgatttttatttccttgtgacctctatatcccccttcccctgcccttggtaagtaactcttgatggagaaaggattaaagactcttatttaaccaaaaaacagagccagctaatcatttccaaaggttagtatctccctgctgacctcttctttggtttaattgaataaaactatatgttcatatatgtattaaaacaactcagaataacatcttttcttccttagttaaggcattataagggctatactatcatccataataaccaaggcaataacttaaaaagctg

SEQ ID NO: 129 - DNA, 546 bp, Homo sapiens
agtgtgatggatatctgcagaattcgggctaagcgtggtcgcggcccgaggtctggaacttcccagcacytgaaaaggagcctcctgagctgactcggctaaagccccactttcgctcctcctcatttctgcctactgatttccttggagcattcatctgaatattaccgtttgctgtgtaacctggtacatacatagcatgactccctggaatagagtgggctggggtgcttatgctgggagagtgattgacatgcactttcaagctatatctaccatttgcagcaaaggagaaaaaatacctcgagtaaattccatcattttttataacatcagcacctgctccatcatcaaggagtctcagcgtaacaggatctccagtctctggctcaactgtggcagtgacagtggcattaagaatgggataaaatccctgtttcacattggcataaatcatcacaggatgaggaaaatggaggctgtctctttccacaaaggcttccacagtggctgggggcacagacctgcccgggcggccgctcgaaa

SEQ ID NO: 130 - DNA, 5156 bp, Homo sapiens
accaaccgaggcgccgggcagcgacccctgcagcggagacagagactgagcggcccggcaccgccatgcctgcgctctggctgggctgctgcctctgcttgtcgctcctcctgcccgcagcccgggccacctccaggagggaagtctgtgattgcaatgggaagtccaggcagtgtatctttgatcgggaacttcacagacaaactggtaatggattccgctgcctcaactgcaatgacaacactgatggcattcactgcgagaagtgcaagaatggcttttaccggcacagagaaagggaccgctgtttgccctgcaattgtaactccaaaggttctcttagtgctcgatgtgacaactccggacggtgcagctgtaaaccaggtgtgacaggagccagatgcgaccgatgtctgccaggcttccacatgctcacggatgcggggtgcacccaagaccagagactgctagactccaagtgtgactgtgacccagctggcatcgcagggccctgtgacgcgggccgctgtgtctgcaagccagctgtcactggagaacgctgtgataggtgtcgatcaggttactataatctggatggggggaaccctgagggctgtacccagtgtttctgctatgggcattcagccagctgccgcagctctgcagaatacagtgtccataagatcacctctacctttcatcaagatgttgatggctggaaggctgtccaacgaaatgggtctcctgcaaagctccaatggtcacagcgccatcaagatgtgtttagctcagcccaacgactagaccctgtctattttgtggctcctgccaaatttcttgggaatcaacaggtgagctatggtcaaagcctgtcctttgactaccgtgtggacagaggaggcagacacccatctgcccatgatgtgattctggaaggtgctggtctacggatcacagctcccttgatgccacttggcaagacactgccttgtgggctcaccaagacttacacattcaggttaaatgagcatccaagcaataattggagcccccagctgagttactttgagtatcgaaggttactgcggaatctcacagccctccgcatccgagctacatatggagaatacagtactgggtacattgacaatgtgaccctgatttcagcccgccctgtctctggagccccagcaccctgggttgaacagtgtatatgtcctgttgggtacaaggggcaattctgccaggattgtgcttctggctacaagagagattcagcgagactggggccttttggcacctgtattccttgtaactgtcaagggggaggggcctgtgatccagacacaggagattgttattcaggggatgagaatcctgacattgagtgtgctgactgcccaattggtttctacaacgatccgcacgacccccgcagctgcaagccatgtccctgtcataacgggttcagctgctcagtgatgccggagacggaggaggtggtgtgcaataactgccctcccggggtcaccggtgcccgctgtgagctctgtgctgatggctactttggggacccctttggtgaacatggcccagtgaggccttgtcagccctgtcaatgcaacaacaatgtggaccccagtgcctctgggaattgtgaccggctgacaggcaggtgtttgaagtgtatccacaacacagccggcatctactgcgaccagtgcaaagcaggctacttcggggacccattggctcccaacccagcagacaagtgtcgagcttgcaactgtaaccccatgggctcagagcctgtaggatgtcgaagtgatggcacctgtgtttgcaagccaggatttggtggccccaactgtgagcatggagcattcagctgtccagcttgctataatcaagtgaagattcagatggatcagtttatgcagcagcttcagagaatggaggccctgatttcaaaggctcagggtggtgatggagtagtacctgatacagagctggaaggcaggatgcagcaggctgagcaggcccttcaggacattctgagagatgcccagatttcagaaggtgctagcagatcccttggtctccagttggccaaggtgaggagccaagagaacagctaccagagccgcctggatgacctcaagatgactgtggaaagagttcgggctctgggaagtcagtaccagaaccgagttcgggatactcacaggctcatcactcagatgcagctgagcctggcagaaagtgaagcttccttgggaaacactaacattcctgcctcagaccactacgtggggccaaatggctttaaaagtctggctcaggaggccacaagattagcagaaagccacgttgagtcagccagtaacatggagcaactgacaagggaaactgaggactattccaaacaagccctctcactggtgcgcaaggccctgcatgaaggagtcggaagcggaagcggtagcccggacggtgctgtggtgcaagggcttgtggaaaaattggagaaaaccaagtccctggcccagcagttgacaagggaggccactcaagcggaaattgaagcagataggtcttatcagcacagtctccgcctcctggattcagtgtctcggcttcagggagtcagtgatcagtcctttcaggtggaagaagcaaagaggatcaaacaaaaagcggattcactctcaagcctggtaaccaggcatatggatgagttcaagcgtacacagaagaatctgggaaactggaaagaagaagcacagcagctcttacagaatggaaaaagtgggagagagaaatcagatcagctgctttcccgtgccaatcttgctaaaagcagagcacaagaagcactgagtatgggcaatgccactttttatgaagttgagagcatccttaaaaacctcagagagtttgacctgcaggtggacaacagaaaagcagaagctgaagaagccatgaagagactctcctacatcagccagaaggtttcagatgccagtgacaagacccagcaagcagaaagagccctggggagcgctgctgctgatgcacagagggcaaagaatggggccggggaggccctggaaatctccagtgagattgaacaggagattgggagtctgaacttggaagccaatgtgacagcagatggagccttggccatggaaaagggactggcctctctgaagagtgagatgagggaagtggaaggagagctggaaaggaaggagctggagtttgacacgaatatggatgcagtacagatggtgattacagaagcccagaaggttgataccagagccaagaacgctggggttacaatccaagacacactcaacacattagacggcctcctgcatctgatggaccagcctctcagtgtagatgaagaggggctggtcttactggagcagaagctttcccgagccaagacccagatcaacagccaactgcggcccatgatgtcagagctggaagagagggcacgtcagcagaggggccacctccatttgctggagacaagcatagatgggattctggctgatgtgaagaacttggagaacattagggacaacctgcccccaggctgctacaatacccaggctcttgagcaacagtgaagctgccataaatatttctcaactgaggttcttgggatacagatctcagggctcgggagccatgtcatgtgagtgggtgggatggggacatttgaacatgtttaatgggtatgctcaggtcaactgacctgaccccattcctgatcccatggccaggtggttgtcttattgcaccatactccttgcttcctgatgctgggcaatgaggcagatagcactgggtgtgagaatgatcaaggatctggaccccaaagaatagactggatggaaagacaaactgcacaggcagatgtttgcctcataatagtcgtaagtggagtcctggaatttggacaagtgctgttgggatatagtcaacttattctttgagtaatgtgactaaaggaaaaaactttgactttgcccaggcatgaaattcttcctaatgtcagaacagagtgcaacccagtcacactgtggccagtaaaatactattgcctcatattgtcctctgcaagcttcttgctgatcagagttcctcctacttacaacccagggtgtgaacatgttctccattttcaagctggaagaagtgagcagtgttggagtgaggacctgtaaggcaggcccattcagagctatggtgcttgctggtgcctgccaccttcaagttctggacctgggcatgacatcctttcttttaatgatgccatggcaacttagagattgcatttttattaaagcatttcctaccagcaaagcaaatgttgggaaagtatttactttttcggtttcaaagtgatagaaaagtgtggcttgggcattgaaagaggtaaaattctctagatttattagtcctaattcaatcctacttttagaacaccaaaaatgatgcgcatcaatgtattttatcttattttctcaatctcctctctctttcctccacccataataagagaatgttcctactcacacttcagctgggtcacatccatccctccattcatccttccatccatctttccatccattacctccatccatccttccaacatatatttattgagtacctactgtgtgccaggggctggtgggacagtggtgacatagtctctgccctcatagagttgattgtctagtgaggaagacaagcatttttaaaaaataaatttaaacttacaaactttgtttgtcacaagtggtgtttattgcaataaccgcttggtttgcaacctctttgctcaacagaacatatgttgcaagaccctcccatgggggcacttgagttttggcaaggctgacagagctctgggttgtgcacatttctttgcattccagctgtcactctgtgcctttctacaactgattgcaacagactgttgagttatgataacaccagtgggaattgctggaggaaccagaggcacttccaccttggctgggaagactatggtgctgccttgcttctgtatttccttggattttcctgaaagtgtttttaaataaagaacaattgttagaaaaaaaaaa

SEQ ID NO: 131 - DNA, 671 bp, Homo sapiens
aggtctggagggcccacagccggatgtgggacaccgggaaaaagtggtcatagcacacatttttgcatcccggttgcagtgtgttgcagacgaagtcctcttgctcgtcaccccacacttcctgggcagccaycacgaggatcatgactcggaaaataaagatgactgtgatccacaccttcccgatgctggtggagtgtttgttgacacccccgatgaaagtgtgcagcgtcccccaatccattgcgctggtttatccctgagtcctgtttccaacgactgccagtgtttcagacccaaagaatgagggcaagatccctctgcgagggtttcagacctccttctcctaccccactggagtgcctagaagccaatgggtgcacagtgatgatacgaatgtcaatctttgctcggtcagtgaggatgtcgcctggaatattcaaattgaattacagatgcatgaagagggcgtacaagttagaatttttctttcgccatacagaaattgtttagccagatcttctgtacttcttttccttccctgacccttcctgctccccaggaagggaggtcagccccgtttgcaaaacacaggatgcccgtgacaccggagacaggtcttcttcaccgacaggaagtgccttctggtgcctgcacgttttaactgctat

SEQ ID NO: 132 - DNA, 590 bp, Homo sapiens
ctgaatggaaaagcttatggctctgtgatgatattagtgaccagcggagatgataagcttcttggcaattgcttacccactgtgctcagcagtggttcaacaattcactccattgccctgggttcatctgcagccccaaatctggaggaattatcacgtcttacaggaggtttaaagttctttgttccagatatatcaaactccaatagcatgattgatgctttcagtagaatttcctctggaactggagacattttccagcaacatattcagcttgaaagtacaggtgaaaatgtcaaacctcaccatcaattgaaaaacacagtgactgtggataatactgtgggcaacgacactatgtttctagttacgtggcaggccagtggtcctcctgagattatattatttgatcctgatggacgaaaatactacacaaataattttatcaccaatctaacttttcggacagctagtctttggattccaggaacagctaagcctgggcactggacttacaccctgaacaatacccatcattctctgcaagccctgaaagtgacagtgacctctcgcgcctccaactcagacct

SEQ ID NO: 133 - DNA, 581 bp, Homo sapiens
aggtcctgtccgggggcactgagaactccctctggaattcttggggggtgttggggagagactgtgggcctggagataaaacttgtctcctctaccaccaccctgtaccctagcctgcacctgtcctcatctctgcaaagttcagcttccttccccaggtctctgtgcactctgtcttggatgctctggggagctcatgggtggaggagtctccaccagagggaggctcaggggactggttgggccagggatgaatatttgagggataaaaattgtgtaagagccaaagaattggtagtagggggagaacagagaggagctgggctatgggaaatgatttgaataatggagctgggaatatggctggatatctggtactaaaaaagggtctttaagaacctacttcctaatctcttccccaatccaaaccatagctgtctgtccagtgctctcttcctgcctccagctctgccccaggctcctcctagactctgtccctgggctagggcaggggaggagggagagcagggttgggggagaggctgaggagagtgtgacatgtggggagaggaccagacctc

SEQ ID NO: 134 - DNA, 4797 bp, Homo sapiens
  misc_feature 135, 501, 4421, 4467, 4468, 4698: n = A,T,C or G
cctgggaccaaagtgctgcccagagctgagggtcctggagccacatgagaaggcttctccctgtgtacctgtgcagcacagggtagggtgagtccactcagctgtctaggagaggacccaggagcagcagagacncgccaagcctttactcataccatattctgatccttttccagcaaattgtggctactaatttgccccctgaagatcaagatggctctggggatgactctgacaacttctccggctcaggtgcaggtgaggttgtcatgggggccccccccacccaagacggcaacaggtcatgcctgggggcagtggtcaggcagtctcctgtgtttactgagcatgtactgagtgcaccctgcctgccctgtctccacccagctggctccaaagggcaatgctgaggagaggaatggggtcgtgagctgctgttaaggagagctcatgcttggaggtgaggtgaaggctgtgagctccagaaggccccagggcgcnctgctgcacgcaggctcatattcactaggaatagctttactcactaagaaacctctggaacccccttcagaaggttatttgactcctgagcctctattttctcatctgcaaaatgggaataataccttgacctgataagcttgtggagctgtaaggcagcacagagccagctggggtgtagctcttccatccaagctcccttccttacttcccctttcctgtggggactgggggagagaagtccctgagctggaggtggtcagggaagcttcacagaggaggtggctcttgagtggacctcaggaagaggggtgagagagctaaggaaggaggctgaggtcatccctggggaagtgacctagcggaggcctgagagctgcaaggtaggatatctgttgttggaagtgtctgttgttggaagtgggggcctttttttcagggagggtggggccagagaagtgtgtgccctgggataagtaggataaccacagtagttatgcccctaagggatgcccaccccacccctgtggtcacagaaaagctttcccaggtggcctaggcacctgtctcgtggctccagagacaggctgcacctgacacacacaatggaaggacagctctccttgtccattttccaaggagcttagcctcagctgccttgtccaggtactagcctccctcatagcctgagcttggccagcccaggtgctctggagcctcccccgacccacccaacacactctgcttctggtcctccccaccccccacctccccaacacactctgcttctggtcctgcaggtgctttgcaagatatcaccttgtcacagcagaccccctccacttggaaggacacgcagctcctgacggctattcccacgtctccagaacccaccggcctggaggctacagctgcctccacctccaccctgccggctggagaggggcccaaggagggagaggctgtagtcctgccagaagtggagcctggcctcaccgcccgggagcaggaggccaccccccgacccagggagaccacacagctcccgaccactcatcaggcctcaacgaccacagccaccacggcccaggagcccgccacctcccacccccacagggacatgcagcctggccaccatgagacctcaacccctgcaggacccagccaagctgaccttcacactccccacacagaggatggaggtccttctgccaccgagagggctgctgaggatggagcctccagtcagctcccagcagcagagggctctggggagcaggtgagtggcctctgcattccttgggaaattgagtgggttggtcctaatgcctggcacttggcaggccctacacctgtgccctgcgcgatctcgtattcctcaccaggaagacagggcacaggggccgccttcccctacccccagggcctcgcagagcaggacagactaactatgagatcagagcagaagcacccttaaagatcacccaagagagggctcccaaactcacaatccaaacttgcagccctcgtcgaagagtgaacgttataccagtcattttatttatagcttcgtggatttacgcttacactaaatagtctgctattcatacaaaatgtgtgctttgtatcactttttgtgatatccatgccatggtccagccagggtccggagttgatgtggcaagaaggcctggctttcgggccctgtgcgatcctggtttgggtgcatctgagtgggtggtggcaaagatcagggaggcaggagctgcttctgggtctgtagtggagctggttgctgctgctggcggtgacctggccaacccaatctgcccctgccctcccacaggacttcacctttgaaacctcgggggagaatacggctgtagtggccgtggagcctgaccgccggaaccagtccccagtggatcagggggccacgggggcctcacagggcctcctggacaggaaagaggtgctgggaggtgagttttctttcaggggggtagtttggggtgaattgctgctgtggggtcagggtggggctgaccacagccaaggccactgctttgggagggtctgcacgagagcccaaggagccgctgagctgagctggccccgtctacctgccctaggggtcattgccggaggcctcgtggggctcatctttgctgtgtgcctggtgggtttcatgctgtaccgcatgaagaagaaggacgaaggcagctactccttggaggagccgaaacaagccaacggcggggcctaccagaagcccaccaaacaggaggaattctatgcctgacgcgggagccatgcgccccctccgccctgccactcactaggcccccacttgcctcttccttgaagaactgcaggccctggcctcccctgccaccaggccacctccccagcattccagcccctctggtcgctcctgcccacggagtcgtgggtgtgctgggagctccactctgcttctctgacttctgcctggagacttagggcaccaggggtttctcgcataggacctttccaccacagccagcacctggcatcgcaccattctgactcggtttctccaaactgaagcagcctctccccaggtccagctctggaggggagggggatccgactgctttggacctaaatggcctcatgtggctggaagatcctgcgggtggggcttggggctcacacacctgtagcacttactggtaggaccaagcatcttgggggggtggccgctgagtggcaggggacaggagtcactttgtttcgtggggaggtctaatctagatatcgacttgtttttgcacatgtttcctctagttctttgttcatagcccagtagaccttgttacttctgaggtaagttaagtaagttgattcggtatccccccatcttgcttccctaatctatggtcgggagacagcatcagggttaagaagacttttttttttttttttaaactaggagaaccaaatctggaagccaaaatgtaggcttagtttgtgtgttgtctcttgagtttgtcgctcatgtgtgcaacagggtatggactatctgtctggtggccccgttctggtggtctgttggcaggctggccagtccaggctgccgtggggccgccgcctctttcaagcagtcgtgcctgtgtccatgcgctcagggccatgctgaggcctgggccgctgccacgttggagaagcccgtgtgagaagtgaatgctgggactcagccttcagacagagaggactgtagggagggcggcaggggcctggagatcctcctgcaggctcacgcccgtcctcctgtggcgccgtctccaggggctgcttcctcctggaaattgacgaggggtgtcttgggcagagctggctctgagcgcctccatccaaggccaggttctccgttagctcctgtggccccaccctgggccctgggctggaatcaggaatattttccaaagagtgatagtcttttgcttttggcaaaactctacttaatccaatgggtttttccctgtacagtagattttccaaatgtaataaactttaatataaagtagtctgtgaatgccactgccttcgcttcttgcctctgtgctgtgtgtgacgtgaccggacttttctgcaaacaccaacatgttgggaaacttggctcgaatctctgtgccttcgtctttcccatggggagggattctggttccagggtccctctgtgtatttgcttttttgttttggctgaaattctcctggaggtcggtaggttcagccaaggttttataaggctgatgtcaatttctgtgttgccaagctccaagcccatcttctaaatggcaaaggaaggtggatggccccagcacagcttgacctgaggctgtggtcacagcggaggtgtggagccgaggcctaccccncagacaccttggacatcctcctcccacccggctgcagaggccagannccagcccagggtcctgcacttacttgcttatttgacaacgtttcagcgactccgttggccactccgagagtgggccagtctgtggatcagagatgcaccaccaagccaagggaacctgtgtccggtattcgatactgcgactttctgcctggagtgtatgactgcacatgactcgggggtggggaaaggggtcggctgaccatgctcatctgctggtccgtgggacggtncccaagccagaggtgggttcatttgtgtaacgacaataaacggtacttgtcatttcgggcaacggctgctgtggtggtggttgagtctcttcttggcct

SEQ ID NO: 135 - DNA, 2856 bp, Homo sapiens
tagtcgcgggtccccgagtgagcacgccagggagcaggagaccaaacgacgggggtcggagtcagagtcgcagtgggagtccccggaccggagcacgagcctgagcgggagagcgccgctcgcacgcccgtcgccacccgcgtacccggcgcagccagagccaccagcgcagcgctgccatggagcccagcagcaagaagctgacgggtcgcctcatgctggctgtgggaggagcagtgcttggctccctgcagtttggctacaacactggagtcatcaatgccccccagaaggtgatcgaggagttctacaaccagacatgggtccaccgctatggggagagcatcctgcccaccacgctcaccacgctctggtccctctcagtggccatcttttctgttgggggcatgattggctccttctctgtgggccttttcgttaaccgctttggccggcggaattcaatgctgatgatgaacctgctggccttcgtgtccgccgtgctcatgggcttctcgaaactgggcaagtcctttgagatgctgatcctgggccgcttcatcatcggtgtgtactgcggcctgaccacaggcttcgtgcccatgtatgtgggtgaagtgtcacccacagcctttcgtggggccctgggcaccctgcaccagctgggcatcgtcgtcggcatcctcatcgcccaggtgttcggcctggactccatcatgggcaacaaggacctgtggcccctgctgctgagcatcatcttcatcccggccctgctgcagtgcatcgtgctgcccttctgccccgagagtccccgcttcctgctcatcaaccgcaacgaggagaaccgggccaagagtgtgctaaagaagctgcgcgggacagctgacgtgacccatgacctgcaggagatgaaggaagagagtcggcagatgatgcgggagaagaaggtcaccatcctggagctgttccgctcccccgcctaccgccagcccatcctcatcgctgtggtgctgcagctgtcccagcagctgtctggcatcaacgctgtcttctattactccacgagcatcttcgagaaggcgggggtgcagcagcctgtgtatgccaccattggctccggtatcgtcaacacggccttcactgtcgtgtcgctgtttgtggtggagcgagcaggccggcggaccctgcacctcataggcctcgctggcatggcgggttgtgccatactcatgaccatcgcgctagcactgctggagcagctaccctggatgtcctatctgagcatcgtggccatctttggctttgtggccttctttgaagtgggtcctggccccatcccatggttcatcgtggctgaactcttcagccagggtccacgtccagctgccattgccgttgcaggcttctccaactggacctcaaatttcattgtgggcatgtgcttccagtatgtggagcaactgtgtggtccctacgtcttcatcatcttcactgtgctcctggttctgttcttcatcttcacctacttcaaagttcctgagactaaaggccggaccttcgatgagatcgcttccggcttccggcaggggggagccagccaaagtgataagacacccgaggagctgttccatcccctgggggctgattcccaagtgtgagtcgccccagatcaccagcccggcctgctcccagcagccctaaggatctctcaggagcacaggcagctggatgagacttccaaacctgacagatgtcagccgagccgggcctggggctcctttctccagccagcaatgatgtccagaagaatattcaggacttaacggctccaggattttaacaaaagcaagactgttgctcaaatctattcagacaagcaacaggttttataatttttttattactgattttgttatttttatatcagcctgagtctcctgtgcccacatcccaggcttcaccctgaatggttccatgcctgagggtggagactaagccctgtcgagacacttgccttcttcacccagctaatctgtagggctggacctatgtcctaaggacacactaatcgaactatgaactacaaagcttctatcccaggaggtggctatggccacccgttctgctggcctggatctccccactctaggggtcaggctccattaggatttgccccttcccatctcttcctacccaaccactcaaattaatctttctttacctgagaccagttgggagcactggagtgcagggaggagaggggaagggccagtctgggctgccgggttctagtctcctttgcactgagggccacactattaccatgagaagagggcctgtgggagcctgcaaactcactgctcaagaagacatggagactcctgccctgttgtgtatagatgcaagatatttatatatatttttggttgtcaatattaaatacagacactaagttatagtatatctggacaagccaacttgtaaatacaccacctcactcctgttacttacctaaacagatataaatggctggtttttagaaacatggttttgaaatgcttgtggattgagggtaggaggtttggatgggagtgagacagaagtaagtggggttgcaaccactgcaacggcttagacttcgactcaggatccagtcccttacacgtacctctcatcagtgtcctcttgctcaaaaatctgtttgatccctgttacccagagaatatatacattctttatcttgacattcaaggcatttctatcacatatttgatagttggtgttcaaaaaaacactagttttgtgccagccgtgatgctcaggcttgaaatcgcattattttgaatgtgaagggaa

SEQ ID NO: 136 - DNA, 356 bp, Homo sapiens
ggtggagccaaatgaagaaaatgaagatgaaagagacagacacctcagtttttctggatcaggcattgatgatgatgaagattttatctccagcaccatttcaaccacaccacgggcttttgaccacacaaaacagaaccaggactggactcagtggaacccaagccattcaaatccggaagtgctacttcagacaaccacaaggatgactgatgtagacagaaatggcaccactgcttatgaaggaaactggaacccagaagcacaccctcccctcattcaccatgagcatcatgaggaagaagagaccccacattctacaagcacaatccaggcaactcctagtagtacaacgg

SEQ ID NO: 137 - DNA, 356 bp, Homo sapiens
  misc_feature 254, 264, 279, 281, 290, 328, 342: n = A,T,C or G
gcaggtggagaagacattttattgttcctggggtctctggaggcccattggtggggctgggtcactggctgcccccggaacagggcgctgctccatggctctgcttgtggtagtctgtggctatgtctcccagcaaggacagaaactcagaaaaatcaatcttcttatcctcattcttgtcctttttctcaaagacatcggcgaggtaatttgtgccctttttacctcggcccgcgaccacgctaaggccaaanttccagacanayggccgggccggtncnataggggancccaacttggggacccaaactctggcgcggaaacacangggcataagcttgnttcctgtggggaaa

SEQ ID NO: 138 - DNA, 353 bp, Homo sapiens
aggtccagtcctccacttggcctgatgagagtggggagtggcaagggacgtttctcctgcaatagacacttagatttctctcttgtgggaagaaaccacctgtccatccactgactcttctacattgatgtggaaattgctgctgctaccaccacctcctgaagaggcttccctgatgccaatgccagccatcttggcatcctggccctcgagcaggctgcggtaagtagcgatctcctgctccagccgtgtctttatgtcaagcagcatcttgtactcctggttctgagcctccatctcgcatcggagctcactcagacctcgsccgsgmssmcgctamgccgaattccagc

SEQ ID NO: 139 - DNA, 371 bp, Homo sapiens
agcgtggtcgcggccgaggtccatccgaagcaagattgcagatggcagtgtgaagagagaagacatattctacacttcaaagctttggtgcaattcccatcgaccagagttggtccgaccagccttggaaaggtcactgaaaaatcttcaattggattatgttgacctctaccttattcattttccagtgtctgtaaagccaggtgaggaagtgatcccaaaagatgaaaatggaaaaatactatttgacacagtggatctctgtgccacgtgggaggccgtggagaagtgtaaagatgcaggattggacctgcccgggcggccgctcgaaagccgaattccagcacactggcggccgttactagtggatc

SEQ ID NO: 140 - DNA, 370 bp, Homo sapiens
tagcgtggtcgcggccgaggtccatctccctttgggaactagggggctgctggtgggaaatgggagccagggcagatgttgcattcctttgtgtccctgtaaatgtgggactacaagaagaggagctgcctgagtggtactttctcttcctggtaatcctctggcccagcctcatggcagaatagaggtatttttaggctatttttgtaatatggcttctggtcaaaatccctgtgtagctgaattcccaagccctgcattgtacagccccccactcccctcaccacctaataaaggaatagttaacactcaaaaaaaaaaaaaaacctgcccgggcggccgctcgaaagccgaattccagcacactggc

SEQ ID NO: 141 - DNA, 371 bp, Homo sapiens
tagcgtggtcgcggccgaggtcctctgtgctgcctgtcacagcccgatggtaccagcgcagggtgtaggcagtgcaggagccctcatccagtggcagggaacaggggtcatcactatcccaaggagcttcagggtcctggtactcctccacagaatactcggagtattcagagtactcatcatcctcagggggtacccgctcttcctcctctgcatgagagacgcggagcacaggcacagcatggagctgggagccggcagtgtctgcagcataactagggaggggtcgtgatccagatgcgatgaactggccctggcaggcacagtgctgactcatctcttggcgacctgcccgggcggccgctcgaagc

SEQ ID NO: 142 - DNA, 343 bp, Homo sapiens
gcgttttgaggccaatggtgtaaaaggaaatatcttcacataaaaactagatggaagcattgtcagaaacctctttgtgatgtttgctttcaactcacagagttgaacattccttttcatagagcagttttgaaacactcttttgtagaatttgcaagcggatgattggatcgctatgaggtcttcattggaaacgggatacctttacataaaaactagacagtagcattctcagaaatttctttgggatgtgggcattcaacccacagaggagaacttcatttgatagagcagttttgaaacaccctttttgtagaatctacaggtggacatttagagtgct

SEQ ID NO: 143 - DNA, 354 bp, Homo sapiens
aggtctgatggcagaaaaactcagactgtctgcaactttacagatggtgcattggttcagcatcaggagtgggatgggaaggaaagcacaataacaagaaaattgaaagatgggaaattagtggtggagtgtgtcatgaacaatgtcacctgtactcggatctatgaaaaagtagaataaaaattccatcatcactttggacaggagttaattaagagaatgaccaagctcagttcaatgagcaaatctccatactgtttctttcttttttttttcattactgtgttcaattatctttatcataaacattttacatgcagctatttcaaagtgtgttggattaattaggatcat

SEQ ID NO: 144 - DNA, 353 bp, Homo sapiens
ggtcaaggacctgggggacccccaggtccagcagccacatgattctgcagcagacagggacctagagcacatctggatctcagccccacccctggcaacctgcctgcctagagaactcccaagatgacagactaagtaggattctgccatttagaataattctggtatcctgggcgttgcgttaagttgcttaactttcattctgtcttacgatagtcttcagaggtgggaacagatgaagaaaccatgccccagagaaggttaagtgacttcctctttatggagccagtgttccaacctaggtttgcctgataccagacctgtggccccacctcccatgcaggtctctgtgg

SEQ ID NO: 145 - DNA, 371 bp, Homo sapiens
caggtctgtcataaactggtctggagtttctgacgactccttgttcaccaaatgcaccatttcctgagacttgctggcctctccgttgagtccacttggctttctgtcctccacagctccattgccactgttgatcactagctttttcttctgcccacaccttcttcgactgttgactgcaatgcaaactgcaagaatcaaagccaaggccaagagggatgccaagatgatcagccattctggaatttggggtgtccttataggaccagaggttgtgtttgctccaccttcttgactcccatgtgagacctcggccgcgaccacgctaagccgaattccagcacactggcggcccgttactagtggatccg

SEQ ID NO: 146 - DNA, 355 bp, Homo sapiens
ggtcctccgtcctcttcccagaggtgtcggggcttggccccagcctccatcttcgtctctcaggatggcgagtagcagcggctccaaggctgaattcattgtcggagggaaatataaactggtacggaagatcgggtctggctccttcggggacatctatttggcgatcaacatcaccaacggcgaggaagtggcagtgaagctagaatctcagaaggccaggcatccccagttgctgtacgagagcaagctctataagattcttcaaggtggggttggcatcccccacatacggtggtatggtcaggaaaaagactacaatgtactagtcatggatcttctgggacctagcctc

SEQ ID NO: 147 - DNA, 355 bp, Homo sapiens
ggtctgttacaaaatgaagacagacaacacaacatttactctgtggagatatcctactcatactatgcacgtgctgtgattttgaacataactcgtcccaaaaacttgtcacgatcatcctgactttttaggttggctgatccatcaatcttgcactcaactgttacttctttcccagtgttgttaggagcaaagctgacctgaacagcaaccaatggctgtagatacccaacatgcagttttttcccataatatgggaaatattttaagtctatcattccattatgaggataaactgctacatttggtatatcttcattctttgaaacacaatctatccttggcactccttcag

SEQ ID NO: 148 - DNA, 369 bp, Homo sapiens
aggtctctctccccctctccctctcctgccagccaagtgaagacatgcttacttccccttcaccttccttcatgatgtgggaagagtgctgcaacccagccctagccaacaccgcatgagagggagtgtgccgagggcttctgagaaggtttctctcacatctagaaagaagcgcttaagatgtggcagcccctcttcttcaagtggctcttgtcctgttgccctgggagttctcaaattgctgcagcagcctccatccagcctgaggatgacatcaatacacagaggaagaagagtcaggaaaagatgagagaagttacagactctcctgggcgaccccgagagcttaccattcctcagacttcttca

SEQ ID NO: 149 - DNA, 620 bp, Homo sapiens; identical to SEQ ID NO: 94
  misc_feature 169, 171, 222, 472, 528, 559, 599: n = A,T,C or G

SEQ ID NO: 150 - DNA, 371 bp, Homo sapiens
ggtccgatcaaaacctgctacctccccaagactttactagtgccgataaactttctcaaagagcaaccagtatcacttccctgtttataaaacctctaaccatctctttgttctttgaacatgctgaaaaccacctggtctgcatgtatgcccgaatttgyaattcttttctctcaaatgaaaatttaattttagggattcatttctatattttcacatatgtagtattattatttccttatatgtgtaaggtgaaatttatggtatttgagtgtgcaagaaaatatatttttaaagctttcatttttcccccagtgaatgatttagaattttttatgtaaatatacagaatgttttttcttacttttata

SEQ ID NO: 151 - DNA, 4655 bp, Homo sapiens
gggacttgagttctgttatcttcttaagtagattcatattgtaagggtctcggggtgggggggttggcaaaatcctggagccagaagaaaggacagcagcattgatcaatcttacagctaacatgttgtacctggaaaacaatgcccagactcaatttagtgagccacagtacacgaacctggggctcctgaacagcatggaccagcagattcagaacggctcctcgtccaccagtccctataacacagaccacgcgcagaacagcgtcacggcgccctcgccctacgcacagcccagctccaccttcgatgctctctctccatcacccgccatcccctccaacaccgactacccaggcccgcacagtttcgacgtgtccttccagcagtcgagcaccgccaagtcggccacctggacgtattccactgaactgaagaaactctactgccaaattgcaaagacatgccccatccagatcaaggtgatgaccccacctcctcagggagctgttatccgcgccatgcctgtctacaaaaaagctgagcacgtcacggaggtggtgaagcggtgccccaaccatgagctgagccgtgaattcaacgagggacagattgcccctyctagtcatttgattcgagtagaggggaacagccatgcccagtatgtagaagatcccatcacaggaagacagagtgtgctggtaccttatgagccaccccaggttggcactgaattcacgacagtcttgtacaatttcatgtgtaacagcagttgtgttggagggatgaaccgccgtccaattttaatcattgttactctggaaaccagagatgggcaagtcctgggccgacgctgctttgaggcccggatctgtgcttgcccaggaagagacaggaaggcggatgaagatagcatcagaaagcagcaagtttcggacagtacaaagaacggtgatggtacgaagcgcccgtttcgtcagaacacacatggtatccagatgacatccatcaagaaacgaagatccccagatgatgaactggtatacttaccagtgaggggccgtgagacttatgaaatgctggtgaagatcaaagagtccctggaactcatgcagtaccttcttcagcacacaattgaaacgtacaggcaacagcaacagcagcagcaccagcacttacttcagaaacagacctcaatacagtctccatcttcatatggtaacagctccccacctctgaacaaaatgaacagcatgaacaagctgccttctgtgagccagcttatcaaccctcagcagcgcaacgccctcactcctacaaccattcctgatggcatgggagccaacattcccatgatgggcacccacatgccaatggctggagacatgaatggactcagccccacccaggcactccctcccccactctccatgccatccacctcccactgcacacccccacctccgtatcccacagattgcagcattgtcagtttcttagcgaggttgggctgttcatcatgtctggactatttcacgacccaggggctgaccaccatctatcagattgagcattactccatggatgatctggcaagtctgaaaatccctgagcaatttcgacatgcgatctggaagggcatcctggaccaccggcagctccacgaattctcctccccttctcatctcctgcggaccccaagcagtgcctctacagtcagtgtgggctccagtgagacccggggtgagcgtgttattgatgctgtgcgattcaccctccgccagaccatctctttcccaccccgagatgagtggaatgacttcaactttgacatggatgctcgccgcaataagcaacagcgcatcaaagaggagggggagtgagcctcaccatgtgagctcttcctatccctctcctaactgccagccccctaaaagcactcctgcttaatcttcaaagccttctccctagctcctccccttcctcttgtctgatttcttaggggaaggagaagtaagaggcttacttcttaccctaaccatctgacctggcatctaattctgattctggctttaagccttcaaaactatagcttgcagaactgtagcttgccatggctaggtagaagtgagcaaaaaagagttgggtgtctccttaagctgcagagatttctcattgacttttataaagcatgttcacccttatagtctaagactatatatataaatgtataaatatacagtatagatttttgggtggggggcattgagtattgtttaaaatgtaatttaaatgaaagaaaattgagttgcacttattgaccattttttaatttacttgttttggatggcttgtctatactccttcccttaaggggtatcatgtatggtgataggtatctagagcttaatgctacatgtgagtgacgatgatgtacagattctttcagttctttggattctaaatacatgccacatcaaacctttgagtagatccatttccattgcttattatgtaggtaagactgtagatatgtattcttttctcagtgttggtatattttatattactgacatttcttctagtgatgatggttcacgttggggtgatttaatccagttataagaagaagttcatgtccaaacgtcctctttagtttttggttgggaatgaggaaaattcttaaaaggcccatagcagccagttcaaaaacacccgacgtcatgtatttgagcatatcagtaacccccttaaatttaataccagataccttatcttacaatattgattgggaaaacatttgctgccattacagaggtattaaaactaaatttcactactagattgactaactcaaatacacatttgctactgttgtaagaattctgattgatttgattgggatgaatgccatctatctagttctaacagtgaagttttactgtctattaatattcagggtaaataggaatcattcagaaatgttgagtctgtactaaacagtaagatatctcaatgaaccataaattcaactttgtaaaaatcttttgaagcatagataatattgtttggtaaatgtttcttttgtttggtaaatgtttcytttaaagaccctcctattctataaaactctgcatgtagaggcttgtttacctttctctctctaaggtttacaataggagtggtgatttgaaaaatataaaattatgagattggttttcctgtggcataaattgcatcactgtatcattttcttttttaaccggtaagagtttcagtttgttggaaagtaactgtgagaacccagtttcccgtccatctcccttagggactacccatagacatgaaaggtccccacagagcaagagataagtctttcatggctgctgttgcttaaaccacttaaacgaagagttcccttgaaactttgggaaaacatgttaatgacaatattccagatctttcagaaatataacacatttttttgcatgcatgcaaatgagctctgaaatcttcccatgcattctggtcaagggctgtcattgcacataagcttccattttaattttaaagtgcaaaagggccagcgtggctctaaaaggtaatgtgtggattgcctctgaaaagtgtgtatatattttgtgtgaaattgcatactttgtattttgattattttttttttcttcttgggatagtgggatttccagaaccacacttgaaacctttttttatcgtttttgtattttcatgaaaataccatttagtaagaataccacatcaaataagaaataatgctacaattttaagaggggagggaagggaaagtttttttttttattatttttttaaaattttgtatgttaaagagaatgagtccttgatttcaaagttttgttgtacttaaatggtaataagcactgtaaacttctgcaacaagcatgcagctttgcaaacccattaaggggaagaatgaaagctgttccttggtcctagtaagaagacaaactgcttcccttactttgctgagggtttgaataaacctaggacttccgagctatgtcagtactattcaggtaacactagggccttggaaatccctgtactgtgtctcatggatttggcactagccaaagcgaggcaccccttactggcttacctcctcatggcagcctactctccttgagtgtatgagtagccagggtaaggggtaaaaggatagtaagcatagaaaccactagaaagtgggcttaatggagttcttgtggcctcagctcaatgcagttagctgaagaattgaaaagtttttgtttggagacgtttataaacagaaatggaaagcagagttttcattaaatccttttaccttttttttttcttggtaatcccctaaaataacagtatgtgggatattgaatgttaaagggatatttttttctattatttttataattgtacaaaattaagcaaatgttaaaagttttatatgctttattaatgttttcaaaaggtattatacatgtgatacattttttaagcttcagttgcttgtcttctggtactttctgttatgggcttttggggagccagaagccaatctacaatctctttttgtttgccaggacatgcaataaaatttaaaaaataaataaaaacta

SEQ ID NO: 152 - protein, 586 aa, Homo sapiens
MLYLENNAQTQFSEPQYTNLGLLNSMDQQIQNGSSSTSPYNTDHAQNSVTAPSPYAQPSSTFDALSPSPAIPSNTDYPGPHSFDVSFQQSSTAKSATWTYSTELKKLYCQIAKTCPIQIKVMTPPPQGAVIRAMPVYKKAEHVTEVVKRCPNHELSREFNEGQIAPSSHLIRVEGNSHAQYVEDPITGRQSVLVPYEPPQVGTEFTTVLYNFMCNSSCVGGMNRRPILIIVTLETRDGQVLGRRCFEARICACPGRDRKADEDSIRKQQVSDSTKNGDGTKRPFRQNTHGIQMTSIKKRRSPDDELVYLPVRGRETYEMLVKIKESLELMQYLLQHTIETYRQQQQQQHQHLLQKQTSIQSPSSYGNSSPPLNKMNSMNKLPSVSQLINPQQRNALTPTTIPDGMGANIPMMGTHMPMAGDMNGLSPTQALPPPLSMPSTSHCTPPPPYPTDCSIVSFLARLGCSSCLDYFTTQGLTTIYQIEHYSMDDLASLKIPEQFRHAIWKGILDHRQLHEFSSPSHLLRTPSSASTVSVGSSETRGERVIDAVRFTLRQTISFPPRDEWNDFNFDMDARRNKQQRIKEEGE

SEQ ID NO: 153 - DNA, 2007 bp, Homo sapiens
gaattcgtcgctgctccagggaaagttctgttactccactgactctctcttttcctgataacatggccagcaagaaagtaattacagtgtttggagcaacaggagctcaaggtggctctgtggccagggcaattttggagagcaaaaaatttgcagtgagagcagtgaccagggatgtgacttgaccaaatgccctggagctccagcgccttggagctgaggtggtcaaaggtgacctgaatgataaagcatcggtggacagtgccttaaaaggtgtctatggggccttcttggtgaccaacttctgggaccctctcaaccaagataaggaagtgtgtcgggggaagctggtggcagactccgccaagcacctgggtctgaagcacgtggtgtacagcggcctggagaacgtcaagcgactgacggatggcaagctggaggtgccgcactttgacagcaagggcgaggtggaggagtacttctggtccattggcatccccatgaccagtgtccgcgtggcggcctactttgaaaactttctcgcggcgtggcggcccgtgaaagcctctgatggagattactacaccttggctgtaccgatgggagatgtaccaatggatggtatctctgttgctgatattggagcagccgtctctagcatttttaattctccagaggaatttttaggcaaggccgtggggctcagtgcagaagcactaacaatacagcaatatgctgatgttttgtccaaggctttggggaaagaagtccgagatgcaaagattaccccggaagctttcgagaagctgggattccctgcagcaaaggaaatagccaatatgtgtcgtttctatgaaatgaagccagaccgagatgtcaatctcacccaccaactaaatcccaaagtcaaaagcttcagccagtttatctcagagaaccagggagccttcaagggcatgtagaaaatcagctgttcagataggcctctgcaccacacagcctctttcctctctgatccttttcctctttacggcacaacattcatgttgacagaacatgctggaatgcaattgtttgcaacaccgaaggatttcctgcggtcgcctcttcagtaggaagcactgcattggtgataggacacggtaatttgattcacatttaacttgctagttagtgataagggtggtacaactgtttggtaaaatgagaagcctcggaacttggagcttctctcctaccactaatgggagggcagattatactgggatttctcctgggtgagtaatttcaagccctaatgctgaaattcccctaggcagctccagttttctcaactgcattgcaaaattcccagtgaacttttaagtacttttaacttaaaaaaatgaacatctttgtagagaattttctggggaacatggtgttcaatgaacaagcacaagcattggaaatgctaaaattcagttttgcctcaagattggaagtttattttctgactcattcatgaagtcatctattgagccaccattcaattattcatctattaattccttgatccttcatttatccattctgcaaacttttcttgagcaccagcacgggtggccatttgtggacttctcttcattcctatgtgttttcttatcaaagtgatccactctcgaaaggctcctttccagtctgtggttgggttcaagtcatgccagggccagggggcccatctcctcgtttagctctaggcaaaatccaggggatctgcagtggggagcgggggcaggaagctggagggaaggcctgtgaagggtagggatgtggaaagacaaggtgacagaaggacccaataggacctttctatatctctggcttagcattttctacatcatattgtaatcgtcttatttgctagttttcttccttactgtgagtgactaacagtcatctttatcccagtgcctggtacataataagtgatcaataaatgttgattgactaaaaaaaaaaaaaaaa

SEQ ID NO: 154 - DNA, 2148 bp, Homo sapiens
gaattcgtcgctgctccagggaaagttctgttactccactgactctctcttttcctgataacatggccagcaagaaagtaattacagtgtttggagcaacaggagctcaaggtggctctgtggccagggcaattttggagagcaaaaaatttgcagtgagagcagtgaccagggatgtgacttgaccaaatgccctggagctccagcgccttggagctgaggtggtcaaaggtgacctgaatgataaagcatcggtggacagtgccttaaaaggggaagctggtggcagactccgccaagcacctgggtctgaagcacgtggtgtacagcggcctggagaacgtcaagcgactgacggatggcaagctggaggtgccgcactttgacagcaagggcgaggtggaggagtacttctggtccattggcatccccatgaccagtgtccgcgtggcggcctactttgaaaactttctcgcggcgtggcggcccgtgaaagcctctgatggagattactacaccttggctgtaccgatgggagatgtaccaatggatggtatctctgttgctgatattggagcagccgtctctagcatttttaattctccagaggaatttttaggcaaggccgtggggctcagtgcagaagcactaacaatacagcaatatgctgatgttttgtccaaggctttggggaaagaagtccgagatgcaaagactatctgtgctatagatgaccagaaaacagtggaagaaggtttcatggaagacgtgggcttgagttggtccttgagggaacatgaccatgtatagacagaggaggcatcaagaaggctggcctggctaattctggaataaacacgacaaaccagaggcagtacgggaaggaggcaaattctggctctgcctctatccttgattaccccggaagctttcgagaagctgggattccctgcagcaaaggaaatagccaatatgtgtcgtttctatgaaatgaagccagaccgagatgtcaatctcacccaccaactaaatcccaaagtcaaaagcttcagccattttatctcagagaaccagggagccttcaagggcatgtagaaaatcagctgttcagataggcctctgcaccacacagcctctttcctctctgatccttttcctctttacggcacaacattcatgttgacagaacatgctggaatgcaattgtttgcaacaccgaaggatttcctgcggtcgcctcttcagtaggaagcactgcattggtgataggacacggtaatttgattcacatttaacttgctagttagtgataagggtggtacaactgtttggtaaaatgagaagcctcggaacttggagcttctctcctaccactaatgggagggcagattatactgggatttctcctgggtgagtaatttcaagccctaatgctgaaattcccctaggcagctccagttttctcaactgcattgcaaaattcccagtgaacttttaagtacttttaacttaaaaaaatgaacatctttgtagagaattttctggggaacatggtgttcaatgaacaagcacaagcattggaaatgctaaaattcagttttgcctcaagattggaagtttattttctgactcattcatgaagtcatctattgagccaccattcaattattcatctattaattccttgatccttcatttatccattctgcaaacttttcttgagcaccagcacgggtggccatttgtggacttctcttcattcctatgtgttttcttatcaaagtgatccactctcgaaaggctcctttccagtctgtggttgggttcaagtcatgccagggccagggggcccatctcctcgtttagctctaggcaaaatccaggggatctgcagtggggagcgggggcaggaagctggagggaaggcctgtgaagggtagggatgtggaaagacaaggtgacagaaggacccaataggacctttctatatctctggcttagcattttctacatcatattgtaatcgtcttatttgctagttttcttccttactgtgagtgactaacagtcatctttatcccagtgcctggtacataataagtgatcaataaatgttgattgactaaatgaaaaaaaaaaaaaaaaaaa

SEQ ID NO: 155 - protein, 153 aa, Homo sapiens
MTSVRVAAYFENFLAAWRPVKASDGDYYTLAVPMGDVPMDGISVADIGAAVSSIFNSPEEFLGKAVGLSAEALTIQQYADVLSKALGKEVRDAKITPEAFEKLGFPAAKEIANMCRFYEMKPDRDVNLTHQLNPKVKSFSQFISENQGAFKGM

SEQ ID NO: 156 - protein, 128 aa, Homo sapiens
MTSVRVAAYFENFLAAWRPVKASDGDYYTLAVPMGDVPMDGISVADIGAAVSSIFNSPEEFLGKAVGLSAEALTIQQYADVLSKALGKEVRDAKTICAIDDQKTVEEGFMEDVGLSWSLREHDHVAGA

SEQ ID NO: 157 - DNA, 424 bp, Homo sapiens
  misc_feature 320, 322: n = A,T,C or G
ctgcagcccgggggatccactagtccagtgtggtggaattcattggtctttacaagacttggatacattacagcagacatggaaatataattttaaaaaatttctctccaacctccttcaaattcagtcaccactgttatattaccttctccaggaaccctccagtggggaaggctgcgatattagatttccttgtatgcaaagtttttgttgaaagctgtgctcagaggaggtgagaggagaggaaggagaaaactgcatcataactttacagaattgaatctagagtcttccccgaaaagcccagaaacttctctgcngnatctggcttgtccatctggtctaaggtggctgcttcttccccagccatcgagtcagtttgtgcccatgaataatacacgacctgctatttcccatgactgct

SEQ ID NO: 158 - DNA, 2099 bp, Homo sapiens
ccgcggttaaaaggcgcagcaggtgggagccggggccttcacccgaaacccgacgagagcccgacagccggcggcgcccgagcccgacctgcctgcccagccggagcgaagggcgccgccccgcgcagagcccgcgccagggccgccggccgcagagcagttaaaacgtgcaggcaccagaaggcacttcctgtcggtgaagaagacctgtctccggtgtcacgggcatcctgtgttttgcaaacggggctgacctcccttcctggggagcaggaagggtcagggaaggaaaagaagtacagaagatctggctaaacaatttctgtatggcgaaagaaaaattctaacttgtacgccctcttcatgcatctttaattcaatttgaatattccaggcgacatcctcactgaccgagcaaagattgacattcgtatcatcactgtgcaccattggcttctaggcactccagtggggtaggagaaggaggtctgaaaccctcgcagagggatcttgccctcattctttgggtctgaaacactggcagtcgttggaaacaggactcagggataaaccagcgcaatggattgggggacgctgcacactttcatcgggggtgtcaacaaacactccaccagcatcgggaaggtgtggatcacagtcatctttattttccgagtcatgatcctcgtggtggctgcccaggaagtgtggggtgacgagcaagaggacttcgtctgcaacacactgcaaccgggatgcaaaaatgtgtgctatgaccactttttcccggtgtcccacatccggctgtgggccctccagctgatcttcgtctccaccccagcgctgctggtggccatgcatgtggcctactacaggcacgaaaccactcgcaagttcaggcgaggagagaagaggaatgatttcaaagacatagaggacattaaaaagcagaaggttcggatagaggggtcgctgtggtggacgtacaccagcagcatctttttccgaatcatctttgaagcagcctttatgtatgtgttttacttcctttacaatgggtaccacctgccctgggtgttgaaatgtgggattgacccctgccccaaccttgttgactgctttatttctaggccaacagagaagaccgtgtttaccatttttatgatttctgcgtctgtgatttgcatgctgcttaacgtggcagagttgtgctacctgctgctgaaagtgtgttttaggagatcaaagagagcacagacgcaaaaaaatcaccccaatcatgccctaaaggagagtaagcagaatgaaatgaatgagctgatttcagatagtggtcaaaatgcaatcacaggttcccaagctaaacatttcaaggtaaaatgtagctgcgtcataaggagacttctgtcttctccagaaggcaataccaacctgaaagttccttctgtagcctgaagagtttgtaaatgactttcataataaatagacacttgagttaactttttgtaggatacttgctccattcatacacaacgtaatcaaatatgtggtccatctctgaaaacaagagactgcttgacaaaggagcattgcagtcactttgacaggttccttttaagtggactctctgacaaagtgggtactttctgaaaatttatataactgttgttgataaggaacatttatccaggaattgatacgtttattaggaaaagatatttttataggcttggatgtttttagttctgactttgaatttatataaagtatttttataatgactggtcttccttacctggaaaaacatgcgatgttagttttagaattacaccacaagtatctaaatttggaacttacaaagggtctatcttgtaaatattgttttgcattgtctgttggcaaatttgtgaactgtcatgatacgcttaaggtggaaagtgttcattgcacaatatatttttactgctttctgaatgtagacggaacagtgtggaagcagaaggcttttttaactcatccgtttgccaatcattgcaaacaactgaaatgtggatgtgattgcctcaataaagctcgtccccattgcttaaaaaaaaaaa

SEQ ID NO: 159 - protein, 291 aa, Homo sapiens
MDWGTLHTFIGGVNKHSTSIGKVWITVIFIFRVMILVVAAQEVWGDEQEDFVCNTLQPGCKNVCYDHFFPVSHIRLWALQLIFVSTPALLVAMHVAYYRHETTRKFRRGEKRNDFKDIEDIKKQKVRIEGSLWWTYTSSIFFRIIFEAAFMYVFYFLYNGYHLPWVLKCGIDPCPNLVDCFISRPTEKTVFTIFMISASVICMLLNVAELCYLLLKVCFRRSKRAQTQKNHPNHALKESKQNEMNELISDSGQNAITGSQAKHFKVKCSCVIRRLLSSPEGNTNLKVPSVA

SEQ ID NO: 160 - DNA, 3951 bp, Homo sapiens
tctgcatccatattgaaaacctgacacaatgtatgcagcaggctcagtgtgagtgaactggaggcttctctacaacatgacccaaaggagcattgcaggtcctatttgcaacctgaagtttgtgactctcctggttgccttaagttcagaactcccattcctgggagctggagtacagcttcaagacaatgggtataatggattgctcattgcaattaatcctcaggtacctgagaatcagaacctcatctcaaacattaaggaaatgataactgaagcttcattttacctatttaatgctaccaagagaagagtatttttcagaaatataaagattttaatacctgccacatggaaagctaataataacagcaaaataaaacaagaatcatatgaaaaggcaaatgtcatagtgactgactggtatggggcacatggagatgatccatacaccctacaatacagagggtgtggaaaagagggaaaatacattcatttcacacctaatttcctactgaatgataacttaacagctggctacggatcacgaggccgagtgtttgtccatgaatgggcccacctccgttggggtgtgttcgatgagtataacaatgacaaacctttctacataaatgggcaaaatcaaattaaagtgacaaggtgttcatctgacatcacaggcatttttgtgtgtgaaaaaggtccttgcccccaagaaaactgtattattagtaagctttttaaagaaggatgcacctttatctacaatagcacccaaaatgcaactgcatcaataatgttcatgcaaagtttatcttctgtggttgaattttgtaatgcaagtacccacaaccaagaagcaccaaacctacagaaccagatgtgcagcctcagaagtgcatgggatgtaatcacagactctgctgactttcaccacagctttcccatgaacgggactgagcttccacctcctcccacattctcgcttgtagaggctggtgacaaagtggtctgtttagtgctggatgtgtccagcaagatggcagaggctgacagactccttcaactacaacaagccgcagaattttatttgatgcagattgttgaaattcataccttcgtgggcattgccagtttcgacagcaaaggagagatcagagcccagctacaccaaattaacagcaatgatgatcgaaagttgctggtttcatatctgcccaccactgtatcagctaaaacagacatcagcatttgttcagggcttaagaaaggatttgaggtggttgaaaaactgaatggaaaagcttatggctctgtgatgatattagtgaccagcggagatgataagcttcttggcaattgcttacccactgtgctcagcagtggttcaacaattcactccattgccctgggttcatctgcagccccaaatctggaggaattatcacgtcttacaggaggtttaaagttctttgttccagatatatcaaactccaatagcatgattgatgctttcagtagaatttcctctggaactggagacattttccagcaacatattcagcttgaaagtacaggtgaaaatgtcaaacctcaccatcaattgaaaaacacagtgactgtggataatactgtgggcaacgacactatgtttctagttacgtggcaggccagtggtcctcctgagattatattatttgatcctgatggacgaaaatactacacaaataattttatcaccaatctaacttttcggacagctagtctttggattccaggaacagctaagcctgggcactggacttacaccctgaacaatacccatcattctctgcaagccctgaaagtgacagtgacctctcgcgcctccaactcagctgtgcccccagccactgtggaagcctttgtggaaagagacagcctccattttcctcatcctgtgatgatttatgccaatgtgaaacagggattttatcccattcttaatgccactgtcactgccacagttgagccagagactggagatcctgttacgctgagactccttgatgatggagcaggtgctgatgttataaaaaatgatggaatttactcgaggtattttttctcctttgctgcaaatggtagatatagcttgaaagtgcatgtcaatcactctcccagcataagcaccccagcccactctattccagggagtcatgctatgtatgtaccaggttacacagcaaacggtaatattcagatgaatgctccaaggaaatcagtaggcagaaatgaggaggagcgaaagtggggctttagccgagtcagctcaggaggctccttttcagtgctgggagttccagctggcccccaccctgatgtgtttccaccatgcaaaattattgacctggaagctgtaaaagtagaagaggaattgaccctatcttggacagcacctggagaagactttgatcagggccaggctacaagctatgaaataagaatgagtaaaagtctacagaatatccaagatgactttaacaatgctattttagtaaatacatcaaagcgaaatcctcagcaagctggcatcagggagatatttacgttctcaccccaaatttccacgaatggacctgaacatcagccaaatggagaaacacatgaaagccacagaatttatgttgcaatacgagcaatggataggaactccttacagtctgctgtatctaacattgcccaggcgcctctgtttattccccccaattctgatcctgtacctgccagagattatcttatattgaaaggagttttaacagcaatgggtttgataggaatcatttgccttattatagttgtgacacatcatactttaagcaggaaaaagagagcagacaagaaagagaatggaacaaaattattataaataaatatccaaagtgtcttccttcttagatataagacccatggccttcgactacaaaaacatactaacaaagtcaaattaacatcaaaactgtattaaaatgcattgagtttttgtacaatacagataagatttttacatggtagatcaacaaattctttttgggggtagattagaaaacccttacactttggctatgaacaaataataaaaattattctttaaagtaatgtctttaaaggcaaagggaagggtaaagtcggaccagtgtcaaggaaagtttgttttattgaggtggaaaaatagccccaagcagagaaaaggagggtaggtctgcattataactgtctgtgtgaagcaatcatttagttactttgattaatttttcttttctccttatctgtgcagaacaggttgcttgtttacaactgaagatcatgctatatttcatatatgaagcccctaatgcaaagctctttacctcttgctattttgttatatatattacagatgaaatctcactgctaatgctcagagatcttttttcactgtaagaggtaacctttaacaatatgggtattacctttgtctcttcataccggttttatgacaaaggtctattgaatttatttgtttgtaagtttctactcccatcaaagcagctttttaagttattgccttggttattatggatgatagttatagcccttataatgccttaactaaggaagaaaagatgttattctgagtttgttttaatacatatatgaacatatagttttattcaattaaaccaaagaagaggtcagcagggagatactaacctttggaaatgattagctggctctgttttttggttaaataagagtctttaatcctttctccatcaagagttacttaccaagggcaggggaagggggatatagaggtcccaaggaaataaaaatcatctttcatctttaattttactccttcctcttatttttttaaaagattatcgaacaataaaatcatttgcctttttaattaaaaacataaaaaaa

SEQ ID NO: 161 - protein, 943 aa, Homo sapiens [sequence omitted]

SEQ ID NO: 162 - DNA, 498 bp, Homo sapiens
tggagaaccacgtggacagcaccatgaacatgttgggcgggggaggcagtgctggccggaagcccctcaagtcgggtatgaaggagctggccgtgttccgggagaaggtcactgagcagcaccggcagatgggcaagggtggcaagcatcaccttggcctggaggagcccaagaagctgcgaccaccccctgccaggactccctgccaacaggaactggaccaggtcctggagcggatctccaccatgcgccttccggatgagcggggccctctggagcacctctactccctgcacatccccaactgtgacaagcatggcctgtacaacctcaaacagtggcaagatgtctctgaacgggcagcgtggggagtgctggtgtgtgaaccccaacaccgggaagctgatccagggagcccccaccatccggggggaccccgagtgtcatctcttctacaatgagcagcaggaggctcgcggggtgcacaccccagcggat

SEQ ID NO: 163 - DNA, 1128 bp, Homo sapiens
gccacctggccctcctgatcgacgacacacgcacttgaaacttgttctcagggtgtgtggaatcaactttccggaagcaaccagcccaccagaggaggtcccgagcgcgagcggagacgatgcagcggagactggttcagcagtggagcgtcgcggtgttcctgctgagctacgcggtgccctcctgcgggcgctcggtggagggtctcagccgccgcctcaaaagagctgtgtctgaacatcagctcctccatgacaaggggaagtccatccaagatttacggcgacgattcttccttcaccatctgatcgcagaaatccacacagctgaaatcagagctacctcggaggtgtcccctaactccaagccctctcccaacacaaagaaccaccccgtccgatttgggtctgatgatgagggcagatacctaactcaggaaactaacaaggtggagacgtacaaagagcagccgctcaagacacctgggaagaaaaagaaaggcaagcccgggaaacgcaaggagcaggaaaagaaaaaacggcgaactcgctctgcctggttagactctggagtgactgggagtgggctagaaggggaccacctgtctgacacctccacaacgtcgctggagctcgattcacggaggcattgaaattttcagcagagaccttccaaggacatattgcaggattctgtaatagtgaacatatggaaagtattagaaatatttattgtctgtaaatactgtaaatgcattggaataaaactgtctcccccattgctctatgaaactgcacattggtcattgtgaatatttttttttttgccaaggctaatccaattattattatcacatttaccataatttattttgtccattgatgtatttattttgtaaatgtatcttggtgctgctgaatttctatattttttgtaacataatgcactttagatatacatatcaagtatgttgataaatgacacaatgaagtgtctctattttgtggttgattttaatgaatgcctaaatataattatccaaattgattttcctttgtgcatgtaaaaataacagtattttaaatttgtaaagaatgtctaataaaatataatctaattacatcatg

SEQ ID NO: 164 - DNA, 1310 bp, Homo sapiens
gggcctggttcgcaaagaagctgacttcagagggggaaactttcttcttttaggaggcggttagccctgttccacgaacccaggagaactgctggccagattaattagacattgctatgggagacgtgtaaacacactacttatcattgatgcatatataaaaccattttattttcgctattatttcagaggaagcgcctctgatttgtttcttttttccctttttgctctttctggctgtgtggtttggagaaagcacagttggagtagccggttgctaaataagtcccgagcgcgagcggagacgatgcagcggagactggttcagcagtggagcgtcgcggtgttcctgctgagctacgcggtgccctcctgcgggcgctcggtggagggtctcagccgccgcctcaaaagagctgtgtctgaacatcagctcctccatgacaaggggaagtccatccaagatttacggcgacgattcttccttcaccatctgatcgcagaaatccacacagctgaaatcagagctacctcggaggtgtcccctaactccaagccctctcccaacacaaagaaccaccccgtccgatttgggtctgatgatgagggcagatacctaactcaggaaactaacaaggtggagacgtacaaagagcagccgctcaagacacctgggaagaaaaagaaaggcaagcccgggaaacgcaaggagcaggaaaagaaaaaacggcgaactcgctctgcctggttagactctggagtgactgggagtgggctagaaggggaccacctgtctgacacctccacaacgtcgctggagctcgattcacggaggcattgaaattttcagcagagaccttccaaggacatattgcaggattctgtaatagtgaacatatggaaagtattagaaatatttattgtctgtaaatactgtaaatgcattggaataaaactgtctcccccattgctctatgaaactgcacattggtcattgtgaatatttttttttttgccaaggctaatccaattattattatcacatttaccataatttattttgtccattgatgtatttattttgtaaatgtatcttggtgctgctgaatttctatattttttgtaacataatgcactttagatatacatatcaagtatgttgataaatgacacaatgaagtgtctctattttgtggttgattttaatgaatgcctaaatataattatccaaattgattttcctttgtgcccgtaaaaataacagtattttaaatttgtaaagaatgtctaataaaatataatctaattac

SEQ ID NO: 165 - protein, 177 aa, Homo sapiens
MQRRLVQQWSVAVFLLSYAVPSCGRSVEGLSRRLKRAVSEHQLLHDKGKSIQDLRRRFFLHHLIAEIHTAEIRATSEVSPNSKPSPNTKNHPVRFGSDDEGRYLTQETNKVETYKEQPLKTPGKKKKGKPGKRKEQEKKKRRTRSAWLDSGVTGSGLEGDHLSDTSTTSLELDSRRH

SEQ ID NO: 166 - protein, 177 aa, Homo sapiens; identical to SEQ ID NO: 165

SEQ ID NO: 167 - DNA, 3362 bp, Homo sapiens
cacaatgtatgcagcaggctcagtgtgagtgaactggaggcttctctacaacatgacccaaaggagcattgcaggtcctatttgcaacctgaagtttgtgactctcctggttgccttaagttcagaactcccattcctgggagctggagtacagcttcaagacaatgggtataatggattgctcattgcaattaatcctcaggtacctgagaatcagaacctcatctcaaacattaaggaaatgataactgaagcttcattttacctatttaatgctaccaagagaagagtatttttcagaaatataaagattttaatacctgccacatggaaagctaataataacagcaaaataaaacaagaatcatatgaaaaggcaaatgtcatagtgactgactggtatggggcacatggagatgatccatacaccctacaatacagagggtgtggaaaagagggaaaatacattcatttcacacctaatttcctactgaatgataacttaacagctggctacggatcacgaggccgagtgtttgtccatgaatgggcccacctccgttggggtgtgttcgatgagtataacaatgacaaacctttctacataaatgggcaaaatcaaattaaagtgacaaggtgttcatctgacatcacaggcatttttgtgtgtgaaaaaggtccttgcccccaagaaaactgtattattagtaagctttttaaagaaggatgcacctttatctacaatagcacccaaaatgcaactgcatcaataatgttcatgcaaagtttatcttctgtggttgaattttgtaatgcaagtacccacaaccaagaagcaccaaacctacagaaccagatgtgcagcctcagaagtgcatgggatgtaatcacagactctgctgactttcaccacagctttcccatgaacgggactgagcttccacctcctcccacattctcgcttgtagaggctggtgacaaagtggtctgtttagtgctggatgtgtccagcaagatggcagaggctgacagactccttcaactacaacaagccgcagaattttatttgatgcagattgttgaaattcataccttcgtgggcattgccagtttcgacagcaaaggagagatcagagcccagctacaccaaattaacagcaatgatgatcgaaagttgctggtttcatatctgcccaccactgtatcagctaaaacagacatcagcatttgttcagggcttaagaaaggatttgaggtggttgaaaaactgaatggaaaagcttatggctctgtgatgatattagtgaccagcggagatgataagcttcttggcaattgcttacccactgtgctcagcagtggttcaacaattcactccattgccctgggttcatctgcagccccaaatctggaggaattatcacgtcttacaggaggtttaaagttctttgttccagatatatcaaactccaatagcatgattgatgctttcagtagaatttcctctggaactggagacattttccagcaacatattcagcttgaaagtacaggtgaaaatgtcaaacctcaccatcaattgaaaaacacagtgactgtggataatactgtgggcaacgacactatgtttctagttacgtggcaggccagtggtcctcctgagattatattatttgatcctgatggacgaaaatactacacaaataattttatcaccaatctaacttttcggacagctagtctttggattccaggaacagctaagcctgggcactggacttacaccctgatgtgtttccaccatgcaaaattattgacctggaagctgtaaaagtagaagaggaattgaccctatcttggacagcacctggagaagactttgatcagggccaggctacaagctatgaaataagaatgagtaaaagtctacagaatatccaagatgactttaacaatgctattttagtaaatacatcaaagcgaaatcctcagcaagctggcatcagggagatatttacgttctcaccccaaatttccacgaatggacctgaacatcagccaaatggagaaacacatgaaagccacagaatttatgttgcaatacgagcaatggataggaactccttacagtctgctgtatctaacattgcccaggcgcctctgtttattccccccaattctgatcctgtacctgccagagattatcttatattgaaaggagttttaacagcaatgggtttgataggaatcatttgccttattatagttgtgacacatcatactttaagcaggaaaaagagagcagacaagaaagagaatggaacaaaattattataaataaatatccaaagtgtcttccttcttagatataagacccatggccttcgactacaaaaacatactaacaaagtcaaattaacatcaaaactgtattaaaatgcattgagtttttgtacaatacagataagatttttacatggtagatcaacaaattctttttgggggtagattagaaaacccttacactttggctatgaacaaataataaaaattattctttaaagtaatgtctttaaaggcaaagggaagggtaaagtcggaccagtgtcaaggaaagtttgttttattgaggtggaaaaatagccccaagcagagaaaaggagggtaggtctgcattataactgtctgtgtgaagcaatcatttagttactttgattaatttttcttttctccttatctgtgcagaacaggttgcttgtttacaactgaagatcatgctatatttcatatatgaagcccctaatgcaaagctctttacctcttgctattttgttatatatattacagatgaaatctcactgctaatgctcagagatcttttttcactgtaagaggtaacctttaacaatatgggtattacctttgtctcttcataccggttttatgacaaaggtctattgaatttatttgtttgtaagtttctactcccatcaaagcagctttctaagttattgccttggttattatggatgatagttatagcccttataatgccttaactaaggaagaaaagatgttattctgagtttgttttaatacatatatgaacatatagttttattcaattaaaccaaagaagaggtcagcagggagatactaacctttggaaatgattagctggctctgttttttggttaaataagagtctttaatcctttctccatcaagagttacttaccaagggcaggggaagggggatatagaggtcacaaggaaataaaaatcatctttcatctttaattttactccttcctcttatttttttaaaagattatcgaacaataaaatcatttgcctttttt

SEQ ID NO: 168 - DNA, 2784 bp, Homo sapiens
tctgcatccatattgaaaacctgacacaatgtatgcagcaggctcagtgtgagtgaactggaggcttctctacaacatgacccaaaggagcattgcaggtcctatttgcaacctgaagtttgtgactctcctggttgccttaagttcagaactcccattcctgggagctggagtacagcttcaagacaatgggtataatggattgctcattgcaattaatcctcaggtacctgagaatcagaacctcatctcaaacattaaggaaatgataactgaagcttcattttacctatttaatgctaccaagagaagagtatttttcagaaatataaagattttaatacctgccacatggaaagctaataataacagcaaaataaaacaagaatcatatgaaaaggcaaatgtcatagtgactgactggtatggggcacatggagatgatccatacaccctacaatacagagggtgtggaaaagagggaaaatacattcatttcacacctaatttcctactgaatgataacttaacagctggctacggatcacgaggccgagtgtttgtccatgaatgggcccacctccgttggggtgtgttcgatgagtataacaatgacaaacctttctacataaatgggcaaaatcaaattaaagtgacaaggtgttcatctgacatcacaggcatttttgtgtgtgaaaaaggtccttgcccccaagaaaactgtattattagtaagctttttaaagaaggatgcacctttatctacaatagcacccaaaatgcaactgcatcaataatgttcatgcaaagtttatcttctgtggttgaattttgtaatgcaagtacccacaaccaagaagcaccaaacctacagaaccagatgtgcagcctcagaagtgcatgggatgtaatcacagactctgctgactttcaccacagctttcccatgaacgggactgagcttccacctcctcccacattctcgcttgtagaggctggtgacaaagtggtctgtttagtgctggatgtgtccagcaagatggcagaggctgacagactccttcaactacaacaagccgcagaattttatttgatgcagattgttgaaattcataccttcgtgggcattgccagtttcgacagcaaaggagagatcagagcccagctacaccaaattaacagcaatgatgatcgaaagttgctggtttcatatctgcccaccactgtatcagctaaaacagacatcagcatttgttcagggcttaagaaaggatttgaggtggttgaaaaactgaatggaaaagcttatggctctgtgatgatattagtgaccagcggagatgataagcttcttggcaattgcttacccactgtgctcagcagtggttcaacaattcactccattgccctgggttcatctgcagccccaaatctggaggaattatcacgtcttacaggaggtttaaagttctttgttccagatatatcaaactccaatagcatgattgatgctttcagtagaatttcctctggaactggagacattttccagcaacatattcagcttgaaagtacaggtgaaaatgtcaaacctcaccatcaattgaaaaacacagtgactgtggataatactgtgggcaacgacactatgtttctagttacgtggcaggccagtggtcctcctgagattatattatttgatcctgatggacgaaaatactacacaaataattttatcaccaatctaacttttcggacagctagtctttggattccaggaacagctaagcctgggcactggacttacaccctgaacaatacccatcattctctgcaagccctgaaagtgacagtgacctctcgcgcctccaactcagctgtgcccccagccactgtggaagcctttgtggaaagagacagcctccattttcctcatcctgtgatgatttatgccaatgtgaaacagggattttatcccattcttaatgccactgtcactgccacagttgagccagagactggagatcctgttacgctgagactccttgatgatggagcaggtgctgatgttataaaaaatgatggaatttactcgaggtattttttctcctttgctgcaaatggtagatatagcttgaaagtgcatgtcaatcactctcccagcataagcaccccagcccactctattccagggagtcatgctatgtatgtaccaggttacacagcaaacggtaatattcagatgaatgctccaaggaaatcagtaggcagaaatgaggaggagcgaaagtggggctttagccgagtcagctcaggaggctccttttcagtgctgggagttccagctggcccccaccctgatgtgtttccaccatgcaaaattattgacctggaagctgtaaatagaagaggaattgaccctatcttggacagcacctggagaagactttgatcagggccaggctacaagctatgaaataagaatgagtaaaagtctacagaatatccaagatgactttaacaatgctattttagtaaatacatcaaagcgaaatcctcagcaagctggcatcagggagatatttacgttctcaccccaaatttccacgaatggacctgaacatcagccaaatggagaaacacatgaaagccacagaatttatgttgcaatacgagcaatggataggaactccttacagtctgctgtatctaacattgcccaggcgcctctgtttattccccccaattctgatcctgtacctgccagagattatcttatattga

SEQ ID NO: 169 - protein, 592 aa, Homo sapiens
MTQRSIAGPICNLKFVTLLVALSSELPFLGAGVQLQDNGYNGLLIAINPQVPENQNLISNIKEMITEASFYLFNATKRRVFFRNIKILIPATWKANNNSKIKQESYEKANVIVTDWYGAHGDDPYTLQYRGCGKEGKYIHFTPNFLLNDNLTAGYGSRGRVFVHEWAHLRWGVFDEYNNDKPFYINGQNQIKVTRCSSDITGIFVCEKGPCPQENCIISKLFKEGCTFIYNSTQNATASIMFMQSLSSVVEFCNASTHNQEAPNLQNQMCSLRSAWDVITDSADFHHSFPMNGTELPPPPTFSLVEAGDKVVCLVLDVSSKMAEADRLLQLQQAAEFYLMQIVEIHTFVGIASFDSKGEIRAQLHQINSNDDRKLLVSYLPTTVSAKTDISICSGLKKGFEVVEKLNGKAYGSVMILVTSGDDKLLGNCLPTVLSSGSTIHSIALGSSAAPNLEELSRLTGGLKFFVPDISNSNSMIDAFSRISSGTGDIFQQHIQLESTGENVKPHHQLKNTVTVDNTVGNDTMFLVTWQASGPPEIILFDPDGRKYYTNNFITNLTFRTASLWIPGTAKPGHWTYTLMCFHHAKLLTWKL

SEQ ID NO: 170 - protein, 791 aa, Homo sapiens
MTQRSIAGPICNLKFVTLLVALSSELPFLGAGVQLQDNGYNGLLIAINPQVPENQNLISNIKEMITEASFYLFNATKRRVFFRNIKILIPATWKANNNSKIKQESYEKANVIVTDWYGAHGDDPYTLQYRGCGKEGKYIHFTPNFLLNDNLTAGYGSRGRVFVHEWAHLRWGVFDEYNNDKPFYINGQNQIKVTRCSSDITGIFVCEKGPCPQENCIISKLFKEGCTFIYNSTQNATASIMFMQSLSSVVEFCNASTHNQEAPNLQNQMCSLRSAWDVITDSADFHHSFPMNGTELPPPPTFSLVEAGDKVVCLVLDVSSKMAEADRLLQLQQAAEFYLMQIVEIHTFVGIASFDSKGEIRAQLHQINSNDDRKLLVSYLPTTVSAKTDISICSGLKKGFEVVEKLNGKAYGSVMILVTSGDDKLLGNCLPTVLSSGSTIHSIALGSSAAPNLEELSRLTGGLKFFVPDISNSNSMIDAFSRISSGTGDIFQQHIQLESTGENVKPHHQLKNTVTVDNTVGNDTMFLVTWQASGPPEIILFDPDGRKYYTNNFITNLTFRTASLWIPGTAKPGHWTYTLNNTHHSLQALKVTVTSRASNSAVPPATVEAFVERDSLHFPHPVMIYANVKQGFYPILNATVTATVEPETGDPVTLRLLDDGAGADVIKNDGIYSRYFFSFAANGRYSLKVHVNHSPSISTPAHSIPGSHAMYVPGYTANGNIQMNAPRKSVGRNEEERKWGFSRVSSGGSFSVLGVPAGPHPDVFPPCKIIDLEAVNRRGIDPILDSTWRRL

SEQ ID NO: 171 - DNA, 1491 bp, Homo sapiens
cctcctgccagccaagtgaagacatgcttacttccccttcaccttccttcatgatgtgggaagagtgctgcaacccagccctagccaacgccgcatgagagggagtgtgccgagggcttctgagaaggtttctctcacatctagaaagaagcgcttaagatgtggcagcccctcttcttcaagtggctcttgtcctgttgccctgggagttctcaaattgctgcagcagcctccacccagcctgaggatgacatcaatacacagaggaagaagagtcaggaaaagatgagagaagttacagactctcctgggcgaccccgagagcttaccattcctcagacttcttcacatggtgctaacagatttgttcctaaaagtaaagctctagaggccgtcaaattggcaatagaagccgggttccaccatattgattctgcacatgtttacaataatgaggagcaggttggactggccatccgaagcaagattgcagatggcagtgtgaagagagaagacatattctacacttcaaagctttggagcaattcccatcgaccagagttggtccgaccagccttggaaaggtcactgaaaaatcttcaattggactatgttgacctctatcttattcattttccagtgtctgtaaagccaggtgaggaagtgatcccaaaagatgaaaatggaaaaatactatttgacacagtggatctctgtgccacatgggaggccatggagaagtgtaaagatgcaggattggccaagtccatcggggtgtccaacttcaaccacaggctgctggagatgatcctcaacaagccagggctcaagtacaagcctgtctgcaaccaggtggaatgtcatccttacttcaaccagagaaaactgctggatttctgcaagtcaaaagacattgttctggttgcctatagtgctctgggatcccatcgagaagaaccatgggtggacccgaactccccggtgctcttggaggacccagtcctttgtgccttggcaaaaaagcacaagcgaaccccagccctgattgccctgcgctaccagctgcagcgtggggttgtggtcctggccaagagctacaatgagcagcgcatcagacagaacgtgcaggtgtttgaattccagttgacttcagaggagatgaaagccatagatggcctaaacagaaatgtgcgatatttgacccttgatatttttgctggcccccctaattatccattttctgatgaatattaacatggagggcattgcatgaggtctgccagaaggccctgcgtgtggatggtgacacagaggatggctctatgctggtgactggacacatcgcctctggttaaatctctcctgcttggcgacttcagtaagctacagctaagcccatcggccggaaaagaaagacaataattttgtttttcattttgaaaaaattaaatgctctctcctaaagattcttcacctaaaaaaaaaaaaaaa

SEQ ID NO: 172 - protein, 364 aa, Homo sapiens
MWQPLFFKWLLSCCPGSSQIAAAASTQPEDDINTQRKKSQEKMREVTDSPGRPRELTIPQTSSHGANRFVPKSKALEAVKLAIEAGFHHIDSAHVYNNEEQVGLAIRSKIADGSVKREDIFYTSKLWSNSHRPELVRPALERSLKNLQLDYVDLYLIHFPVSVKPGEEVIPKDENGKILFDTVDLCATWEAMEKCKDAGLAKSIGVSNFNHRLLEMILNKPGLKYKPVCNQVECHPYFNQRKLLDFCKSKDIVLVAYSALGSHREEPWVDPNSPVLLEDPVLCALAKKHKRTPALIALRYQLQRGVVVLAKSYNEQRIRQNVQVFEFQLTSEEMKAIDGLNRNVRYLTLDIFAGPPNYPFSDEY

SEQ ID NO: 173 - DNA, 1988 bp, Homo sapiens
cgggagccgcctccccgcggcctcttcgcttttgtggcggcgcccgcgctcgcaggccactctctgctgtcgcccgtcccgcgcgctcctccgacccgctccgctccgctccgctcggccccgcgccgcccgtcaacatgatccgctgcggcctggcctgcgagcgctgccgctggatcctgcccctgctcctactcagcgccatcgccttcgacatcatcgcgctggccggccgcggctggttgcagtctagcgaccacggccagacgtcctcgctgtggtggaaatgctcccaagagggcggcggcagcgggtcctacgaggagggctgtcagagcctcatggagtacgcgtggggtagagcagcggctgccatgctcttctgtggcttcatcatcctggtgatctgtttcatcctctccttcttcgccctctgtggaccccagatgcttgtcttcctgagagtgattggaggtctccttgccttggctgctgtgttccagatcatctccctggtaatttaccccgtgaagtacacccagaccttcacccttcatgccaaccctgctgtcacttacatctataactgggcctacggctttgggtgggcagccacgattatcctgatcggctgtgccttcttcttctgctgcctccccaactacgaagatgaccttctgggcaatgccaagcccaggtacttctacacatctgcctaacttgggaatgaatgtgggagaaaatcgctgctgctgagatggactccagaagaagaaactgtttctccaggcgactttgaacccattttttggcagtgttcatattattaaactagtcaaaaatgctaaaataatttgggagaaaatattttttaagtagtgttatagtttcatgtttatcttttattatgttttgtgaagttgtgtcttttcactaattacctatactatgccaatatttccttatatctatccataacatttatactacatttgtaagagaatatgcacgtgaaacttaacactttataaggtaaaaatgaggtttccaagatttaataatctgatcaagttcttgttatttccaaatagaatggacttggtctgttaagggctaaggagaagaggaagataaggttaaaagttgttaatgaccaaacattctaaaagaaatgcaaaaaaaaagtttattttcaagccttcgaactatttaaggaaagcaaaatcatttcctaaatgcatatcatttgtgagaatttctcattaatatcctgaatcattcatttcagctaaggcttcatgttgactcgatatgtcatctaggaaagtactatttcatggtccaaacctgttgccatagttggtaaggctttcctttaagtgtgaaatatttagatgaaattttctcttttaaagttctttatagggttagggtgtgggaaaatgctatattaataaatctgtagtgttttgtgtttatatgttcagaaccagagtagactggattgaaagatggactgggtctaatttatcatgactgatagatctggttaagttgtgtagtaaagcattaggagggtcattcytgtcacaaaagtgccactaaaacagcctcaggagaataaatgacttgcttttctaaatctcaggtttatctgggctctatcatatagacaggcttctgatagtttgcarctgtaagcagaaacctacatatagttaaaatcctggtctttcttggtaaacagattttaaatgtctgatataaaacatgccacaggagaattcggggatttgagtttctctgaatagcatatatatgatgcatcggataggtcattatgattttttaccatttcgacttacataatgaaaaccaattcattttaaatatcagattattattttgtaagttgtggaaaaagctaattgtagttttcattatgaagttttcccaataaaccaggtattctaaaaaaaaaaaaaaaa

SEQ ID NO: 174 - protein, 238 aa, Homo sapiens
GAASPRPLRFCGGARARRPLSAVARPARSSDPLRSAPLGPAPPVNMIRCGLACERCRWILPLLLLSAIAFDIIALAGRGWLQSSDHGQTSSLWWKCSQEGGGSGSYEEGCQSLMEYAWGRAAAAMLFCGFIILVICFILSFFALCGPQMLVFLRVIGGLLALAAVFQIISLVIYPVKYTQTFTLHANPAVTYIYNWAYGFGWAATIILIGCAFFFCCLPNYEDDLLGNAKPRYFYTSA

SEQ ID NO: 175 - DNA, 4181 bp, Homo sapiens
  misc_feature 3347, 3502, 3506, 3520, 3538, 3549, 3646, 3940, 3968, 3974,4036, 4056, 4062, 4080, 4088, 4115: n = A,T,C or G
ggtggatgcgtttgggttgtagctaggctttttcttttctttctcttttaaaacacatctagacaaggaaaaaacaagcctcggatctgatttttcactcctcgttcttgtgcttggttcttactgtgtttgtgtattttaaaggcgagaagacgaggggaacaaaaccagctggatccatccatcaccgtgggtggttttaatttttcgttttttctcgttatttttttttaaacaaccactcttcacaatgaacaaactgtatatcggaaacctcagcgagaacgccgccccctcggacctagaaagtatcttcaaggacgccaagatcccggtgtcgggacccttcctggtgaagactggctacgcgttcgtggactgcccggacgagagctgggccctcaaggccatcgaggcgctttcaggtaaaatagaactgcacgggaaacccatagaagttgagcactcggtcccaaaaaggcaaaggattcggaaacttcagatacgaaatatcccgcctcatttacagtgggaggtgctggatagtttactagtccagtatggagtggtggagagctgtgagcaagtgaacactgactcggaaactgcagttgtaaatgtaacctattccagtaaggaccaagctagacaagcactagacaaactgaatggatttcagttagagaatttcaccttgaaagtagcctatatccctgatgaaatggccgcccagcaaaaccccttgcagcagccccgaggtcgccgggggcttgggcagaggggctcctcaaggcaggggtctccaggatccgtatccaagcagaaaccatgtgatttgcctctgcgcctgctggttcccacccaatttgttggagccatcataggaaaagaaggtgccaccattcggaacatcaccaaacagacccagtctaaaatcgatgtccaccgtaaagaaaatgcgggggctgctgagaagtcgattactatcctctctactcctgaaggcacctctgcggcttgtaagtctattctggagattatgcataaggaagctcaagatataaaattcacagaagagatccccttgaagattttagctcataataactttgttggacgtcttattggtaaagaaggaagaaatcttaaaaaaattgagcaagacacagacactaaaatcacgatatctccattgcaggaattgacgctgtataatccagaacgcactattacagttaaaggcaatgttgagacatgtgccaaagctgaggaggagatcatgaagaaaatcagggagtcttatgaaaatgatattgcttctatgaatcttcaagcacatttaattcctggattaaatctgaacgccttgggtctgttcccacccacttcagggatgccacctcccacctcagggcccccttcagccatgactcctccctacccgcagtttgagcaatcagaaacggagactgttcatcagtttatcccagctctatcagtcggtgccatcatcggcaagcagggccagcacatcaagcagctttctcgctttgctggagcttcaattaagattgctccagcggaagcaccagatgctaaagtgaggatggtgattatcactggaccaccagaggctcagttcaaggctcagggaagaatttatggaaaaattaaagaagaaaactttgttagtcctaaagaagaggtgaaacttgaagctcatatcagagtgccatcctttgctgctggcagagttattggaaaaggaggcaaaacggtgaatgaacttcagaatttgtcaagtgcagaagttgttgtccctcgtgaccagacacctgatgagaatgaccaagtggttgtcaaaataactggtcacttctatgcttgccaggttgcccagagaaaaattcaggaaattctgactcaggtaaagcagcaccaacaacagaaggctctgcaaagtggaccacctcagtcaagacggaagtaaaggctcaggaaacagcccaccacagaggcagatgccaaaccaaagacagattgcttaaccaacagatgggcgctgaccccctatccagaatcacatgcacaagtttttacctagccagttgtttctgaggaccaggcaacttttgaactcctgtctctgtgagaatgtatactttatgctctctgaaatgtatgacacccagctttaaaacaaacaaacaaacaaacaaaaaaagggtgggggagggagggaaagagaagagctctgcacttccctttgttgtagtctcacagtataacagatattctaattcttcttaatattcccccataatgccagaaattggcttaatgatgctttcactaaattcatcaaatagattgctcctaaatccaattgttaaaattggatcagaataattatcacaggaacttaaatgttaagccattagcatagaaaaactgttctcagttttatttttacctaacactaacatgagtaacctaagggaagtgctgaatggtgttggcaggggtattaaacgtgcatttttactcaactacctcaggtattcagtaatacaatgaaaagcaaaattgttccttttttttgaaaattttatatactttataatgatagaagtccaaccgttttttaaaaaataaatttaaaatttaacagcaatcagctaacaggcaaattaagatttttacttctggctggtgacagtaaagctggaaaattaatttcagggttttttgaggcttttgacacagttattagttaaatcaaatgttcaaaaatacggagcagtgcctagtatctggagagcagcactaccatttattctttcatttatagttgggaaagtttttgacggtactaacaaagtggtcgcaggagattttggaacggctggtttaaatggcttcaggagacttcagttttttgtttagctacatgattgaatgcataataaatgctttgtgcttctgactatcaatacctaaagaaagtgcatcagtgaagagatgcaagactttcaactgactggcaaaaagcaagctttagcttgtcttataggatgcttagtttgccactacacttcagaccaatgggacagtcatagatggtgtgacagtgtttaaacgcaacaaaaggctacatttccatggggccagcactgtcatgagcctcactaagctattttgaagatttttaagcactgataaattaaaaaaaaaaaaaaaaaattagactccaccttaagtagtaaagtataacaggatttctgtatactgtgcaatcagttctttgaaaaaaaagtcaaaagatagagaatacaagaaaagttttngggatataatttgaatgactgtgaaaacatatgacctttgataacgaactcatttgctcactccttgacagcaaagcccagtacgtacaattgtgttgggtgtgggtggtctccaaggccacgctgctctctgaattgattttttgagttttggnttgnaagatgatcacagncatgttacactgatcttnaaggacatatnttataaccctttaaaaaaaaaatcccctgcctcattcttatttcgagatgaatttcgatacagactagatgtctttctgaagatcaattagacattntgaaaatgatttaaagtgttttccttaatgttctctgaaaacaagtttcttttgtagttttaaccaaaaaagtgccctttttgtcactggtttctcctagcattcatgatttttttttcacacaatgaattaaaattgctaaaatcatggactggctttctggttggatttcaggtaagatgtgtttaaggccagagcttttctcagtatttgatttttttccccaatatttgattttttaaaaatatacacataggagctgcatttaaaacctgctggtttaaattctgtcanatttcacttctagccttttagtatggcnaatcanaatttacttttacttaagcatttgtaatttggagtatctggtactagctaagaaataattcnataattgagttttgtactcnccaaanatgggtcattcctcatgnataatgtncccccaatgcagcttcattttccaganaccttgacgcaggataaattttttcatcatttaggtccccaaaaaaaaaaaaaaaaaaaaaaaaaa

SEQ ID NO: 176 - protein, 579 aa, Homo sapiens
MNKLYIGNLSENAAPSDLESIFKDAKIPVSGPFLVKTGYAFVDCPDESWALKAIEALSGKIELHGKPIEVEHSVPKRQRIRKLQIRNIPPHLQWEVLDSLLVQYGVVESCEQVNTDSETAVVNVTYSSKDQARQALDKLNGFQLENFTLKVAYIPDEMAAQQNPLQQPRGRRGLGQRGSSRQGSPGSVSKQKPCDLPLRLLVPTQFVGAIIGKEGATIRNITKQTQSKIDVHRKENAGAAEKSITILSTPEGTSAACKSILEIMHKEAQDIKFTEEIPLKILAHNNFVGRLIGKEGRNLKKIEQDTDTKITISPLQELTLYNPERTITVKGNVETCAKAEEEIMKKIRESYENDIASMNLQAHLIPGLNLNALGLFPPTSGMPPPTSGPPSAMTPPYPQFEQSETETVHQFIPALSVGAIIGKQGQHIKQLSRFAGASIKIAPAEAPDAKVRMVIITGPPEAQFKAQGRIYGKIKEENFVSPKEEVKLEAHIRVPSFAAGRVIGKGGKTVNELQNLSSAEVVVPRDQTPDENDQVVVKITGHFYACQVAQRKIQEILTQVKQHQQQKALQSGPPQSRRK

SEQ ID NO: 177 - DNA, 401 bp, Homo sapiens
atgccccgtaaatgtcttcagtgttcttcagggtagttgggatctcaaaagatttggttcagatccaaacaaatacacattctgtgttttagctcagtgttttctaaaaaaagaaactgccacacagcaaaaaattgtttactttgttggacaaaccaaatcagttctcaaaaaatgaccggtgcttataaaaagttataaatatcgagtagctctaaaacaaaccacctgaccaagagggaagtgagcttgtgcttagtatttacattggatgccagttttgtaatcactgacttatgtgcaaactggtgcagaaattctataaactctttgctgtttttgatacctgctttttgtttcattttgttttgttttgtaaaaatgataaaacttcagaaaat

SEQ ID NO: 178 - DNA, 561 bp, Homo sapiens
acgcctttcaagggtgtacgcaaagcactcattgatacccttttggatggctatgaaacagcccgctatgggacaggggtctttggccagaatgagtacctacgctatcaggaggccctgagtgagctggccactgcggttaaagcacgaattgggagctctcagcgacatcaccagtcagcagccaaagacctaactcagtcccctgaggtctccccaacaaccatccaggtgacatacctcccctccagtcagaagagtaaacgtgccaagcacttccttgaattgaagagctttaaggataactataacacattggagagtactctgtgacggagctgaaggactcttgccgtagattaagccagtcagttgcaatgtgcaagacaggctgcttgccgggccgccctcggaacatctggcccagcaggcccagactgtatccatccaagttcccgttgtatccagagttcttagagcttgtgtctaaagggtaattccccaacccttccttatgagcatttttagaacattggctaagactattttcccccagtagcg

SEQ ID NO: 179 - DNA, 521 bp, Homo sapiens
cccaacgcgtttgcaaatattcccctggtagcctacttccttacccccgaatattggtaagatcgagcaatggcttcaggacatgggttctcttctcctgtgatcattcaagtgctcactgcatgaagactggcttgtctcagtgtttcaacctcaccagggctgtctcttggtccacacctcgctccctgttagtgccgtatgacagcccccatcaaatgaccttggccaagtcacggtttctctgtggtcaaggttggttggctgattggtggaaagtagggtggaccaaaggaggccacgtgagcagtcagcaccagttctgcaccagcagcgcctccgtcctagtgggtgttcctgtttctcctggccctgggtgggctagggcctgattcgggaagatgcctttgcagggaggggaggataagtgggatctaccaattgattctggcaaaacaatttctaagatttttttgctttatgtgggaaacagatctaaatctcattttatgctgtatttt

SEQ ID NO: 180 - DNA, 417 bp, Homo sapiens
ggtggaattcgccgaagatggcggaggtgcaggtcctggtgcttgatggtcgaggccatctcctgggccgcctggcggccatcgtggctaaacaggtactgctgggccggaaggtggtggtcgtacgctgtgaaggcatcaacatttctggcaatttctacagaaacaagttgaagtacctggctttcctccgcaagcggatgaacaccaacccttcccgaggcccctaccacttccgggcccccagccgcatcttctggcggaccgtgcgaggtatgctgccccacaaaaccaagcgaggccaggccgctctggaccgtctcaaggtgtttgacggcatcccaccgccctacgacaagaaaaagcggatggtggttcctgctgccctcaaggtcgtgcgtctgaagcctacaagaa

SEQ ID NO: 181 - DNA, 283 bp, Homo sapiens
  misc_feature 35: n = A,T,C or G
gatttcttctaaataggatgtaaaacttctttcanattactcttcctcagtcctgcctgccaagaactcaagtgtaactgtgataaaataacctttcccaggtatattggcaggtatgtgtgtaatctcagaatacacaggtgacatagatatgatatgacaactggtaatggtggattcatttacattgtttacacttctatgaccaggccttaagggaaggtcagttttttaaaaaaccaagtagtgtcttcctacctatctccagatacatgtcaaaaaa

SEQ ID NO: 182 - DNA, 401 bp, Homo sapiens
atattcttgctgcttatgcagctgacattgttgccctccctaaagcaaccaagtagcctttatttcccacagtgaaagaaaacgctggcctatcagttacattacaaaaggcagatttcaagaggattgagtaagtagttggatggctttcataaaaacaagaattcaagaagaggattcatgctttaagaaacatttgttatacattcctcacaaattatacctgggataaaaactatgtagcaggcagtgtgttttccttccatgtctctctgcactacctgcagtgtgtcctctgaggctgcaagtctgtcctatctgaattcccagcagaagcactaagaagctccaccctatcacctagcagataaaactatggggaaaacttaaatctgtgcata

SEQ ID NO: 183 - DNA, 366 bp, Homo sapiens
  misc_feature 325: n = A,T,C or G
accgtgtccaagtttttagaacccttgttagccagaccgaggtgtcctggtcaccgtttcaccatcatgctttgatgttcccctgtctttctctcttctgctctcaagagcaaaggttaatttaaggacaaagatgaagtcactgtaaactaatctgtcattgtttttaccttccttttctttttcagtgcagaaattaaaagtaagtataaagcaccgtgattgggagtgtttttgcgtgtgtcggaatcactggtaaatgttggctgagaacaatccctccccttgcacttgtgaaaacactttgagcgctttaagagattancctgagaaataattaaatatcttttctcttcaaaaaaaaaa

SEQ ID NO: 184 - DNA, 370 bp, Homo sapiens
tcttacttcaaaagaaaaataaacataaaaaataagttgctggttcctaacaggaaaaattttaataattgtactgagagaaactgcttacgtacacattgcagatcaaatatttggagttaaaatgttagtctacatagatgggtgattgtaactttattgccattaaaagatttcaaattgcattcatgcttctgtgtacacataatgaaaaatgggcaaataatgaagatctctccttcagtctgctctgtttaattctgctgtctgctcttctctaatgctgcgtccctaattgtacacagtttagtgatatctaggagtataaagttgtcgcccatcaataaaaatcacaaagttggtttaaaaa

SEQ ID NO: 185 - DNA, 107 bp, Homo sapiens
ctcatattattttccttttgagaaattggaaactctttctgttgctattatattaataaagttggtgtttattttctggtagtcaccttccccatttaaaaaaaaaa

SEQ ID NO: 186 - DNA, 309 bp, Homo sapiens
gaaaggatggctctggttgccacagagctgggacttcatgttcttctagagagggccacaagagggccacaggggtggccgggagttgtcagctgatgcctgctgagaggcaggaattgtgccagtgagtgacagtcatgagggagtgtctcttcttggggaggaaagaaggtagagcctttctgtctgaatgaaaggccaaggctacagtacagggccccgccccagccagggtgttaatgcccacgtagtggaggcctctggcagatcctgcattccaaggtcactggactgtacgtttttatggtt

SEQ ID NO: 187 - DNA, 477 bp, Homo sapiens
ttcagtcctagcaagaagcgagaattctgagatcctccagaaagtcgagcagcacccacctccaacctcgggccagtgtcttcaggctttactggggacctgcgagctggcctaatgtggtggcctgcaagccaggccatccctgggcgccacagacgagctccgagccaggtcaggcttcggaggccacaagctcagcctcaggcccaggcactgattgtggcagaggggccactacccaaggtctagctaggcccaagacctagttacccagacagtgagaagcccctggaaggcagaaaagttgggagcatggcagacagggaagggaaacattttcagggaaaagacatgtatcacatgtcttcagaagcaagtcaggtttcatgtaaccgagtgtcctcttgcgtgtccaaaagtagcccagggctgtagcacaggcttcacagtgattttgtgttcagccgtgagtcacac

SEQ ID NO: 188 - DNA, 220 bp, Homo sapiens
taaatatggtagatattaatattcctcttagatgaccagtgattccaattgtcccaagttttaaataagtaccctgtgagtatgagataaattagtgacaatcagaacaagtttcagtatcagatgttcaagaggaagttgctattgcattgattttaatatttgtacataaacactgatttttttgagcattattttgtatttgttgtactttaatacc

SEQ ID NO: 189 - DNA, 417 bp, Homo sapiens
  misc_feature 76, 77: n = A,T,C or G
accatcttgacagaggatacatgctcccaaaacgtttgttaccacacttaaaaatcactgccatcattaagcatcnntttcaaaattatagccattcatgatttactttttccagatgactatcattattctagtcctttgaatttgtaaggggaaaaaaaacaaaaacaaaaacttacgatgcacttttctccagcacatcagatttcaaattgaaaattaaagacatgctatggtaatgcacttgctagtactacacactttgtacaacaaaaaacagaggcaagaaacaacggaaagagaaaagccttcctttgttggcccttaaactgagtcaagatctgaaatgtagagatgatctctgacgatacctgtatgttcttattgtgtaaataaaattgctggtatgaaatgaca

SEQ ID NO: 190 - DNA, 497 bp, Homo sapiens
gcactgcggcgctctcccgtcccgcggtggttgctgctgctgccgctgctgctgggcctgaacgcaggagctgtcattgactggcccacagaggagggcaaggaagtatgggattatgtgacggtccgcaaggatgcctacatgttctggtggctctattatgccaccaactcctgcaagaacttctcagaactgcccctggtcatgtggcttcagggcggtccaggcggttctagcactggatttggaaactttgaggaaattgggccccttgacagtgatctcaaaccacggaaaaccacctggctccaggctgccagtctcctatttgtggataatcccgtgggcactgggttcagttatgtgaatggtagtggtgcctatgccaaggacctggctatggtggcttcagacatgatggttctcctgaagaccttcttcagttgccacaaagaattccagacagttccattctacattttctcagagtcctatgg

SEQ ID NO: 191 - DNA, 175 bp, Homo sapiens
atgttgaatattttgcttattaactttgtttattgtcttctccctcgattagaatattagctacttgagtacaaggatttgagcctgttacattcactgctgaattttaggctcctggaagatacccagcattcaatagagaccacacaataaatatatgtcaaataaaaaaaaa

SEQ ID NO: 192 - DNA, 526 bp, Homo sapiens
agtaaacattattattttttttatatttgcaaaggaaacatatctaatccttcctatagaaagaacagtattgctgtaattccttttcttttcttcctcatttcctctgccccttaaaagattgaagaaagagaaacttgtcaactcatatccacgttatctagcaaagtacataagaatctatcactaagtaatgtatccttcagaatgtgttggtttaccagtgacaccccatattcatcacaaaattaaagcaagaagtccatagtaatttatttgctaatagtggatttttaatgctcagagtttctgaggtcaaattttatcttttcacttacaagctctatgatcttaaataatttacttaatgtattttggtgtattttcctcaaattaatattggtgttcaagactatatctaattcctctgatcactttgagaaacaaacttttattaaatgtaaggcacttttctatgaattttaaatataaaaataaatattgttctgattattactgaaaaaaa

SEQ ID NO: 193 - DNA, 553 bp, Homo sapiens
  misc_feature 290, 300, 411, 441: n = A,T,C or G
tccattgtggtggaattcgctctctggtaaaggcgtgcaggtgttggccgcggcctctgagctgggatgagccgtgctcccggtggaagcaagggagcccagccggagccatggccagtacagtggtagcagttggactgaccattgctgctgcaggatttgcaggccgttacgttttgcaagccatgaagcatatggagcctcaagtaaaacaagtttttcaaagcctaccaaaatctgccttcagtggtggctattatagaggtgggtttgaacccaaaatgacaaancgggaagcancattaatactaggtgtaagccctactgccaataaagggaaaataagagatgctcatcgacgaattatgcttttaaatcatcctgacaaaggaggatctccttatatagcanccaaaatcaatgaagctaaagatttactanaaggtcaagctaaaaaatgaagtaaatgtatgatgaattttaagttcgtattagtttatgtatatgagtactaagtttttataataaaatgcctcagagctacaattttaaa

SEQ ID NO: 194 - DNA, 320 bp, Homo sapiens
cccttcccaatccatcagtaaagaccccatctgccttgtccatgccgtttcccaacagggatgtcacttgatatgagaatctcaaatctcaatgccttataagcattccttcctgtgtccattaagactctgataattgtctcccctccataggaatttctcccaggaaagaaatatatccccatctccgtttcatatcagaactaccgtccccgatattcccttcagagagattaaagaccagaaaaaagtgagcctcttcatctgcacctgtaatagtttcagttcctattttcttccattgacccatatttatacct

SEQ ID NO: 195 - DNA, 320 bp, Homo sapiens
  misc_feature 203, 218: n = A,T,C or G
aagcatgacctggggaaatggtcagaccttgtattgtgtttttggccttgaaagtagcaagtgaccagaatctgccatggcaacaggctttaaaaaagacccttaaaaagacactgtctcaactgtggtgttagcaccagccagctctctgtacatttgctagcttgtagttttctaagactgagtaaacttcttatttttanaaaggggaggctggnttgtaactttccttgtacttaattgggtaaaagtcttttccacaaaccaccatctattttgtgaactttgttagtcatcttttatttggtaaattatgaact

SEQ ID NO: 196 - DNA, 357 bp, Homo sapiens
  misc_feature 36: n = A,T,C or G
atataaaataatacgaaactttaaaaagcattggantgtcagtatgttgaatcagtagtttcactttaactgtaaacaatttcttaggacaccatttgggctagtttctgtgtaagtgtaaatactacaaaaacttatttatactgttcttatgtcatttgttatattcatagatttatatgatgatatgacatctggctaaaaagaaattattgcaaaactaaccactatgtacttttttataaatactgtatggacaaaaaatggcattttttatattaaattgtttagctctggcaaaaaaaaaaaattttaagagctggtactaataaaggattattatgactgttaaaaaaa

SEQ ID NO: 197 - DNA, 565 bp, Homo sapiens
  misc_feature 27: n = A,T,C or G
tcagctgagtaccatcaggatatttanccctttaagtgctgttttgggagtagaaaactaaagcaacaatacttcctcttgacagctttgattggaatggggttattagatcattcaccttggtcctacactttttaggatgcttggtgaacataacaccacttataatgaacatccctggttcctatattttgggctatgtgggtaggaattgttacttgttactgcagcagcagccctagaaagtaagcccagggcttcagatctaagttagtccaaaagctaaatgatttaaagtcaagttgtaatgctaggcataagcactctataatacattaaattataggccgagcaattagggaatgtttctgaaacattaaacttgtatttatgtcactaaaattctaacacaaacttaaaaaatgtgtctcatacatatgctgtactaggcttcatcatgcatttctaaatttgtgtatgatttgaatatatgaaagaatttatacaagagtgttatttaaaattattaaaaataaatgtatataatttgtacctattgtaaaaa

SEQ ID NO: 198 - DNA, 484 bp, Homo sapiens
tatgtaagtattggtgtctgctttaaaaaaggagacccagacttcacctgtcctttttaaacatttgagaacagtgttactctgagcagttgggccaccttcaccttatccgacagctgactgttggatgtgtccattgtcgccagtttggctgttgcccggacaggacaggacctccattgggcgcagcagcaggtggcaggggtgtggcttgaggtgggtggcagcgtctggtcctcctctctggtgctttctgagagggtctctaaagcagagtgtggttggcctgggggaaggcagagcacgtatttctcccctctagtacctctgcatttgtgagtgttccctctggctttctgaagggcagcagactcttgagtatactgcagaggacatgctttatcagtaggtcctgagggctccaggggctcaactgaccaagtaacacagaagttggggtatgtggcctatttgggtcggaaac

SEQ ID NO: 199 - DNA, 429 bp, Homo sapiens
  misc_feature 77, 88, 134, 151, 189, 227, 274, 319: n = A,T,C or G
gcttatgttttttgttttaacttttgttttttaacatttagaatattacattttgtattatacagtacctttctcanacattttgtanaattcatttcggcagctcactaggattttgctgaacattaaaaagngtgatagcgatattagngccaatcaaatggaaaaaaggtagtcttaataaacaanacacaacgtttttatacaacatactttaaaatattaanaaaactccttaatattgtttcctattaagtattattctttgggcaanattttctgatgcttttgattttctctcaatttagcatttgctttnggtttttttctctatttagcattctgttaaggcacaaaaactatgtactgtatgggaaatgttgtaaatattaccttttccacattttaaacagacaactttgaatccaa

SEQ ID NO: 200 - DNA, 279 bp, Homo sapiens
gcttttttgaggaattacagggaagctcctggaattgtacatggatatctttatccctagggggaaatcaaggagctgggcacccctaattctttatggaagtgtttaaaactattttaattttattacaagtattactagagtagtggttctactctaagatttcaaaagtgcatttaaaatcatacatgttcccgcctgcaaatatattgttattttggtggagaaaaaaatagtatattctacataaaaaattaaagatattaactaagaaaaaaa

SEQ ID NO: 201 - DNA, 569 bp, Homo sapiens
taggtcagtatttttagaaactcttaatagctcatactcttgataccaaaagcagccctgattgttaaagcacacacctgcacaagaagcagtgatggttgcatttacatttcctgggtgcacaaaaaaaaattctcaaaaagcaaggacttacgctttttgcaaagcctttgagaagttactggatcataggaagcttataacaagaatggaagattcttaaataactcactttctttggtatccagtaacagtagatgttcaaaatatgtagctgattaataccagcattgtgaacgctgtacaaccttgtggttattactaagcaagttactactagcttctgaaaagtagcttcataattaatgttatttatacactgccttccatgacttttactttgccctaagctaatctccaaaatctgaaatgctactccaatatcagaaaaaaagggggaggtggaattatatttcctgtgattttaagagtacagagaatcatgcacatctctgattagttcatatatgtctagtgtgtaataaaagtcaaagatgaactctcaaaaa

SEQ ID NO: 202 - DNA, 501 bp, Homo sapiens
attaataggcttaataattgttggcaaggatccttttgctttctttggcatgcaagctcctagcatctggcagtggggccaagaaaataaggtttatgcatgtatgatggttttcttcttgagcaacatgattgagaaccagtgtatgtcaacaggtgcatttgagataactttaaatgatgtacctgtgtggtctaagctggaatctggtcaccttccatccatgcaacaacttgttcaaattcttgacaatgaaatgaagctcaatgtgcatatggattcaatcccacaccatcgatcatagcaccacctatcagcactgaaaactcttttgcattaagggatcattgcaagagcagcgtgactgacattatgaaggcctgtactgaagacagcaagctgttagtacagaccagatgctttcttggcaggctcgttgtacctcttggaaaacctcaatgcaagatagtgtttcagtgctggcatattttggaattctgc

SEQ ID NO: 203 - DNA, 261 bp, Homo sapiens
  misc_feature 36, 96: n = A,T,C or G
gacaagctcctggtcttgagatgtcttctcgttaangagatgggccttttggaggtaaaggataaaatgaatgagttctgtcatgattcactattntataacttgcatgacctttactgtgttagctctttgaatgttcttgaaattttagactttctttgtaaacaaatgatatgtccttatcattgtataaaagctgttatgtgcaacagtgtggagattccttgtctgatttaataaaatacttaaacactgaaaaaa

SEQ ID NO: 204 - DNA, 421 bp, Homo sapiens
agcatcttttctacaacgttaaaattgcagaagtagcttatcattaaaaaacaacaacaacaacaataacaataaatcctaagtgtaaatcagttattctaccccctaccaaggatatcagcctgttttttcccttttttctcctgggaataattgtgggcttcttcccaaatttctacagcctctttcctcttctcatgcttgagcttccctgtttgcacgcatgcgtgtgcaggactggcttgtgtgcttggactcggctccaggtggaagcatgctttcccttgttactgttggagaaactcaaaccttcaagccctaggtgtagccattttgtcaagtcatcaactgtatttttgtactggcattaacaaaaaaagaagataaaatattgtaccattaaactttaataaaactttaa

SEQ ID NO: 205 - DNA, 460 bp, Homo sapiens
tactctcacaatgaaggacctggaatgaaaaatctgtgtctaaacaagtcctctttagattttagtgcaaatccagagccagcgtcggttgcctcgagtaattctttcatgggtacctttggaaaagctctcaggagacctcacctagatgcctattcaagctttggacagccatcagattgtcagccaagagccttttatttgaaagctcattcttccccagacttggactctgggtcagaggaagatgggaaagaaaggacagattttcaggaagaaaatcacatttgtacctttaaacagactttagaaaactacaggactccaaattttcagtcttatgacttggacacatagactgaatgagaccaaaggaaaagcttaacatactacctcaaggtgaacttttatttaaaagagagagaatcttatgttttttaaatggagttatgaattttaa

SEQ ID NO: 206 - DNA, 481 bp, Homo sapiens
tgtggtggaattcgggacgcccccagaccctgactttttcctgcgtgggccgtctcctcctgcggaagcagtgacctctgacccctggtgaccttcgctttgagtgccttttgaacgctggtcccgcgggacttggttttctcaagctctgtctgtccaaagacgctccggtcgaggtcccgcctgccctgggtggatacttgaaccccagacgcccctctgtgctgctgtgtccggaggcggccttcccatctgcctgcccacccggagctctttccgccggcgcagggtcccaagcccacctcccgccctcagtcctgcggtgtgcgtctgggcacgtcctgcacacacaatgcaagtcctggcctccgcgcccgcccgcccacgcgagccgtacccgccgccaactctgttatttatggtgtgaccccctggaggtgccctcggcccaccggggctatttattgtttaatttatttgt

SEQ ID NO: 207 - DNA, 605 bp, Homo sapiens
accctttttggattcagggctcctcacaattaaaatgagtgtaatgaaacaaggtgaaaatatagaagcatccctttgtatactgttttgctacttacagtgtacttggcattgctttatctcactggattctcacggtaggatttctgagatcttaatctaagctccaaagttgtctacttttttgatcctagggtgctccttttgttttacagagcagggtcacttgatttgctagctggtggcagaattggcaccattacccaggtctgactgaccaccagtcagaggcactttatttgtatcatgaaatgatttgaaatcattgtaaagcagcgaagtctgataatgaatgccagctttccttgtgctttgataacaaagactccaaatattctggagaacctggataaaagtttgaagggctagattgggatttgaagacaaaattgtaggaaatcttacatttttgcaataacaaacattaatgaaagcaaaacattataaaagtaattttaattcaccacatacttatcaatttcttgatgcttccaaatgacatctaccagatatggttttgtggacatctttttctgtttacataa

SEQ ID NO: 208 - DNA, 655 bp, Homo sapiens
ggcgttgttctggattcccgtcgtaacttaaagggaaactttcacaatgtccggagcccttgatgtcctgcaaatgaaggaggaggatgtccttaagttccttgcagcaggaacccacttaggtggcaccaatcttgacttccagatggaacagtacatctataaaaggaaaagtgatggcatctatatcataaatctcaagaggacctgggagaagcttctgctggcagctcgtgcaattgttgccattgaaaaccctgctgatgtcagtgttatatcctccaggaatactggccagagggctgtgctgaagtttgctgctgccactggagccactccaattgctggccgcttcactcctggaaccttcactaaccagatccaggcagccttccgggagccacggcttcttgtggttactgaccccagggctgaccaccagcctctcacggaggcatcttatgttaacctacctaccattgcgctgtgtaacacagattctcctctgcgctatgtggacattgccatcccatgcaacaacaagggagctcactcagtgggtttgatgtggtggatgctggctcgggaagttctgcgcatgcgtggcaccatttcccgtgaacacccatgggaggtcatgcctgatctgtacttc

SEQ ID NO: 209 - DNA, 621 bp, Homo sapiens
catttagaacatggttatcatccaagactactctaccctgcaacattgaactcccaagagcaaatccacattcctcttgagttctgcagcttctgtgtaaatagggcagctgtcgtctatgccgtagaatcacatgatctgaggaccattcatggaagctgctaaatagcctagtctggggagtcttccataaagttttgcatggagcaaacaaacaggattaaactaggtttggttccttcagccctctaaaagcatagggcttagcctgcaggcttccttgggctttctctgtgtgtgtagttttgtaaacactatagcatctgttaagatccagtgtccatggaaaccttcccacatgccgtgactctggactatatcagtttttggaaagcagggttcctctgcctgctaacaagcccacgtggaccagtctgaatgtctttcctttacacctatgtttttaaatagtcaaacttcaagaaacaatctaaacaagtttctgttgcatatgtgtttgtgaacttgtatttgtatttagtaggcttctatattgcatttaacttgtttttgtaactcctgattcttccttttcggatactattgatgaataaagaaatt

SEQ ID NO: 210 - DNA, 533 bp, Homo sapiens
  misc_feature 20, 21, 61: n = A,T,C or G
cgccttggggagccggcggnngagtccgggacgtggagacccggggtcccggcagccgggnggcccgcgggcccagggtggggatgcaccgccgcggggtgggagctggcgccatcgccaagaagaaacttgcagaggccaagtataaggagcgagggacggtcttggctgaggaccagctagcccagatgtcaaagcagttggacatgttcaagaccaacctggaggaatttgccagcaaacacaagcaggagatccggaagaatcctgagttccgtgtgcagttccaggacatgtgtgcaaccattggcgtggatccgctggcctctggaaaaggattttggtctgagatgctgggcgtgggggacttctattacgaactaggtgtccaaattatcgaagtgtgcctggcgctgaagcatcggaatggaggtctgataactttggaggaactacatcaacaggtgttgaagggaaggggcaagttcgcccaggatgtcagtcaagatgacctgatcagagccatcaagaaa

SEQ ID NO: 211 - DNA, 451 bp, Homo sapiens
ttagcttgagccgagaacgaggcgagaaagctggagaccgaggagaccgcctagagcggagtgaacggggaggggaccgtggggaccggcttgatcgtgcgcggacacctgctaccaagcggagcttcagcaaggaagtggaggagcggagtagagaacggccctcccagcctgaggggctgcgcaaggcagctagcctcacggaggatcgggaccgtgggcgggatgccgtgaagcgagaagctgccctacccccagtgagccccctgaaggcggctctctctgaggaggagttagagaagaaatccaaggctatcattgaggaatatctccatctcaatgacatgaaagaggcagtccagtgcgtgcaggagctggcctcaccctccttgctcttcatctttgtacggcatggtgtcgagtctacgctggagcgcagtgccattgctcg

SEQ ID NO: 212 - DNA, 471 bp, Homo sapiens
  misc_feature 54: n = A,T,C or G
gtgattattcttgatcagggagaagatcatttagatttgttttgcattccttanaatggagggcaacattccacagctgccctggctgtgatgagtgtccttgcaggggccggagtaggagcactggggtgggggcggaattggggttactcgatgtaagggattccttgttgttgtgttgagatccagtgcagttgtgatttctgtggatcccagcttggttccaggaattttgtgtgattggcttaaatccagttttcaatcttcgacagctgggctggaacgtgaactcagtagctgaacctgtctgacccggtcacgttcttggatcctcagaactctttgctcttgtcggggtgggggtgggaactcacgtggggagcggtggctgagaaaatgtaaggattctggaatacatattccatgggactttccttccctctcctgcttcctcttttcctgctccctaac

SEQ ID NO: 213 - DNA, 511 bp, Homo sapiens
  misc_feature 27, 63, 337, 442: n = A,T,C or G
ctaattagaaacttgctgtactttttnttttcttttaggggtcaaggaccctctttatagctnccatttgcctacaataaattattgcagcagtttgcaatactaaaatattttttatagactttatatttttccttttgataaagggatgctgcatagtagagttggtgtaattaaactatctcagccgtttccctgctttcccttctgctccatatgcctcattgtccttccagggagctcttttaatcttaaagttctacatttcatgctcttagtcaaattctgttacctttttaataactcttcccactgcatatttccatcttgaattggnggttctaaattctgaaactgtagttgagatacagctatttaatatttctgggagatgtgcatccctcttctttgtggttgcccaaggttgttttgcgtaactganactccttgatatgcttcagagaatttaggcaaacactggccatggccgtgggagtactgggagtaaaat

SEQ ID NO: 214 - DNA, 521 bp, Homo sapiens
agcattgccaaataatccctaattttccactaaaaatataatgaaatgatgttaagctttttgaaaagtttaggttaaacctactgttgttagattaatgtatttgttgcttccctttatctggaatgtggcattagcttttttattttaaccctctttaattcttattcaattccatgacttaaggttggagagctaaacactgggatttttggataacagactgacagttttgcataattataatcggcattgtacatagaaaggatatggctaccttttgttaaatctgcactttctaaatatcaaaaaagggaaatgaagtataaatcaatttttgtataatctgtttgaaacatgagttttatttgcttaatattagggctttgccccttttctgtaagtctcttgggatcctgtgtagaagctgttctcattaaacaccaaacagttaagtccattctctggtactagctacaaattcggtttcatattctacttaacaatttaaataaactgaa

SEQ ID NO: 215 - DNA, 381 bp, Homo sapiens
  misc_feature 17, 20, 60, 61, 365: n = A,T,C or G
gagcggagagcggaccngtnagagccctgagcagccccaccgccgccgccggcctagttnncatcacaccccgggaggagccgcagctgccgcagccggccccagtcaccatcaccgcaaccatgagcagcgaggccgagacccagcagccgcccgccgccccccccgccgcccccgccctcagcgccgccgacaccaagcccggcactacgggcagcggcgcagggagcggtggcccgggcggcctcacatcggcggcgcctgccggcggggacaagaaggtcatcgcaacgaaggttttgggaacagtaaaatggttcaatgtaaggaacggatatggtttcatcaacaggaatgacaccaangaagatgtatttgtac

SEQ ID NO: 216 - DNA, 425 bp, Homo sapiens
ttactaactaggtcattcaaggaagtcaagttaacttaaacatgtcacctaaatgcacttgatggtgttgaaatgtccaccttcttaaatttttaagatgaacttagttctaaagaagataacaggccaatcctgaaggtactccctgtttgctgcagaatgtcagatattttggatgttgcataagagtcctatttgccccagttaattcaacttttgtctgcctgttttgtggactggctggctctgttagaactctgtccaaaaagtgcatggaatataacttgtaaagcttcccacaattgacaatatatatgcatgtgtttaaaccaaatccagaaagcttaaacaatagagctgcataatagtatttattaaagaatcacaactgtaaacatgagaataacttaaggattctagtttag

SEQ ID NO: 217 - DNA, 181 bp, Homo sapiens
gagaaaccaaatgataggttgtagagcctgatgactccaaacaaagccatcacccgcattcttcctccttcttctggtgctacagctccaagggcccttcaccttcatgtctgaaatggaactttggctttttcagtggaagaatatgttgaaggtttcattttgttctagaaaaaaaaaa

SEQ ID NO: 218 - DNA, 405 bp, Homo sapiens
caggccttccagttcactgacaaacatggggaagtgtgcccagctggctggaaacctggcagtgataccatcaagcctgatgtccaaaagagcaaagaatatttctccaagcagaagtgagcgctgggctgttttagtgccaggctgcggtgggcagccatgagaacaaaacctcttctgtattttttttttccattagtaaaacacaagacttcagattcagccgaattgtggtgtcttacaaggcaggcctttcctacagggggtggagagaccagcctttcttcctttggtaggaatggcctgagttggcgttgtgggcaggctactggtttgtatgatgtattagtagagcaacccattaatcttttgtagtttgtattaaacttgaactgagaaaaaaaa

SEQ ID NO: 219 - DNA, 216 bp, Homo sapiens
  misc_feature 207, 210: n = A,T,C or G
actccaagagttagggcagcagagtggagcgatttagaaagaacattttaaaacaatcagttaatttaccatgtaaaattgctgtaaatgataatgtgtacagattttctgttcaaatattcaattgtaaacttcttgttaagactgttacgtttctattgcttttgtatgggatattgcaaaaataaaaaggaaagaaccctcttnaanaaaaaa

SEQ ID NO: 220 - DNA, 380 bp, Homo sapiens
cttacaaattgcccccatgtgtaggggacacagaaccctttgagaaaacttagatttttgtctgtacaaagtctttgcctttttccttcttcatttttttccagtacattaaatttgtcaatttcatctttgagggaaactgattagatgggttgtgtttgtgttctgatggagaaaacagcaccccaaggactcagaagatgattttaacagttcagaacagatgtgtgcaatattggtgcatgtaataatgttgagtggcagtcaaaagtcatgatttttatcttagttcttcattactgcattgaaaaggaaaacctgtctgagaaaatgcctgacagtttaatttaaaactatggtgtaagtctttgacaaaaaaa

SEQ ID NO: 221 - DNA, 398 bp, Homo sapiens
ggttagtaagctgtcgactttgtaaaaaagttaaaaatgaaaaaaaaaggaaaaatgaattgtatatttaatgaatgaacatgtacaatttgccactgggaggaggttcctttttgttgggtgagtctgcaagtgaatttcactgatgttgatattcattgtgtgtagttttatttcggtcccagccccgtttccttttattttggagctaatgccagctgcgtgtctagttttgagtgcagtaaaatagaatcagcaaatcactcttatttttcatccttttccggtattttttgggttgtttctgtgggagcagtgtacaccaactcttcctgtatattgcctttttgctggaaaatgttgtatgttgaataaaattttctataaaaattaaaaaa

SEQ ID NO: 222 - DNA, 301 bp, Homo sapiens
  misc_feature 49, 64: n = A,T,C or G
ttcgataattgatctcatgggctttccctggaggaaaggttttttttgntgtttattttttaanaacttgaaacttgtaaactgagatgtctgtagcttttttgcccatctgtagtgtatgtgaagatttcaaaacctgagagcactttttctttgtttagaattatgagaaaggcactagatgactttaggatttgcatttttccctttattgcctcatttcttgtgacgccttgttggggagggaaatctgtttattttttcctacaaataaaaagctaagattctatatcgcaaaaaa

SEQ ID NO: 223 - DNA, 200 bp, Homo sapiens
gtaagtgcttaggaagaaactttgcaaacatttaatgaggatacactgttcatttttaaaattccttcacactgtaatttaatgtgttttatattcttttgtagtaaaacaacataactcagatttctacaggagacagtggttttatttggattgtcttctgtaataggtttcaataaagctggatgaacttaaaaaaa

SEQ ID NO: 224 - DNA, 385 bp, Homo sapiens
gaaaggtttgatccggactcaaagaaagcaaaggagtgtgagccgccatctgctggagcagctgtaactgcaagacctggacaagagattcgtcagcgaactgcagctcaaagaaacctttctccaacaccagcaagccctaaccagggccctcctccacaagttccagtatctcctggaccaccaaaggacagttctgcccctggtggacccccagaaaggactgttactccagccctatcatcaaatgtgttaccaagacatcttggatcccctgctacttcagtgcctggaatgggtaaacagagcacttaatgttatttacagtttatattgttttctctggttaccaataaaacgggccattttcaggtggtaaaaaaaa

SEQ ID NO: 225 - protein, 560 aa, Homo sapiens
MECLYYFLGFLLLAARLPLDAAKRFHDVLGNERPSAYMREHNQLNGWSSDENDWNEKLYPVWKRGDMRWKNSWKGGRVQAVLTSDSPALVGSNITFAVNLIFPRCQKEDANGNIVYEKNCRNEAGLSADPYVYNWTAWSEDSDGENGTGQSHHNVFPDGKPFPHHPGWRRWNFIYVFHTLGQYFQKLGRCSVRVSVNTANVTLGPQLMEVTVYRRHGRAYVPIAQVKDVYVVTDQIPVFVTMFQKNDRNSSDETFLKDLPIMFDVLIHDPSHFLNYSTINYKWSFGDNTGLFVSTNHTVNHTYVLNGTFSLNLTVKAAAPGPCPPPPPPPRPSKPTPSLGPAGDNPLELSRIPDENCQINRYGHFQATITIVEGILEVNIIQMTDVLMPVPWPESSLIDFVVTCQGSIPTEVCTIISDPTCEITQNTVCSPVDVDEMCLLTVRRTFNGSGTYCVNLTLGDDTSLALTSTLISVPDRDPASPLRMANSALISVGCLAIFVTVISLLVYKKHKEYNPIENSPGNVVRSKGLSVFLNRAKAVFFPGNQEKDPLLKNQEFKGVS

SEQ ID NO: 226 - protein, 9 aa, Homo sapiens
ILIPATWKA

SEQ ID NO: 227 - protein, 9 aa, Homo sapiens
FLLNDNLTA

SEQ ID NO: 228 - protein, 9 aa, Homo sapiens
LLGNCLPTV

SEQ ID NO: 229 - protein, 10 aa, Homo sapiens
KLLGNCLPTV

SEQ ID NO: 230 - protein, 10 aa, Homo sapiens
RLTGGLKFFV

SEQ ID NO: 231 - protein, 9 aa, Homo sapiens
SLQALKVTV

SEQ ID NO: 232 - protein, 20 aa, Homo sapiens
AGADVIKNDGIYSRYFFSFA

SEQ ID NO: 233 - protein, 21 aa, Homo sapiens
FFSFAANGRYSLKVHVNHSPS

SEQ ID NO: 234 - protein, 20 aa, Homo sapiens
FLVTWQASGPPEIILFDPDG

SEQ ID NO: 235 - protein, 20 aa, Homo sapiens
LQSAVSNIAQAPLFIPPNSD

SEQ ID NO: 236 - protein, 20 aa, Homo sapiens
IQDDFNNAILVNTSKRNPQQ

SEQ ID NO: 237 - protein, 21 aa, Homo sapiens
RNSLQSAVSNIAQAPLFIPPN

SEQ ID NO: 238 - protein, 20 aa, Homo sapiens
THESHRIYVAIRAMDRNSLQ

SEQ ID NO: 239 - protein, 20 aa, Homo sapiens
RNPQQAGIREIFTFSPQIST

SEQ ID NO: 240 - protein, 21 aa, Homo sapiens
GQATSYEIRMSKSLQNIQDDF

SEQ ID NO: 241 - protein, 20 aa, Homo sapiens
ERKWGFSRVSSGGSFSVLGV

SEQ ID NO: 242 - protein, 20 aa, Homo sapiens
GSHAMYVPGYTANGNIQMNA

SEQ ID NO: 243 - protein, 20 aa, Homo sapiens
VNHSPSISTPAHSIPGSHAM

SEQ ID NO: 244 - protein, 20 aa, Homo sapiens
AVPPATVEAFVERDSLHFPH

SEQ ID NO: 245 - protein, 20 aa, Homo sapiens
KPGHWTYTLNNTHHSLQALK

SEQ ID NO: 246 - protein, 20 aa, Homo sapiens
NLTFRTASLWIPGTAKPGHW

SEQ ID NO: 247 - protein, 20 aa, Homo sapiens
LHFPHPVMIYANVKQGFYPI

SEQ ID NO: 248 - protein, 20 aa, Homo sapiens
PETGDPVTLRLLDDGAGADV

SEQ ID NO: 249 - protein, 20 aa, Homo sapiens
GFYPILNATVTATVEPETGD

SEQ ID NO: 250 - protein, 20 aa, Homo sapiens
FDPDGRKYYTNNFITNLTFR

SEQ ID NO: 251 - protein, 20 aa, Homo sapiens
LQALKVTVTSRASNSAVPPA

SEQ ID NO: 252 - protein, 153 aa, Homo sapiens
MASVRVAAYFENFLAAWRPVKASDGDYYTLAVPMGDVPMDGISVADIGAAVSSIFNSPEEFLGKAVGLSAEALTIQQYADVLSKALGKEVRDAKITPEAFEKLGFPAAKEIANMCRFYEMKPDRDVNLTHQLNPKVKSFSQFISENQGAFKGM

SEQ ID NO: 253 - DNA, 462 bp, Homo sapiens
atggccagtgtccgcgtggcggcctactttgaaaactttctcgcggcgtggcggcccgtgaaagcctctgatggagattactacaccttggctgtaccgatgggagatgtaccaatggatggtatctctgttgctgatattggagcagccgtctctagcatttttaattctccagaggaatttttaggcaaggccgtggggctcagtgcagaagcactaacaatacagcaatatgctgatgttttgtccaaggctttggggaaagaagtccgagatgcaaagattaccccggaagctttcgagaagctgggattccctgcagcaaaggaaatagccaatatgtgtcgtttctatgaaatgaagccagaccgagatgtcaatctcacccaccaactaaatcccaaagtcaaaagcttcagccagtttatctcagagaaccagggagccttcaagggcatgtag

SEQ ID NO: 254 - DNA, 8031 bp, Homo sapiens
tggcgaatgggacgcgccctgtagcggcgcattaagcgcggcgggtgtggtggttacgcgcagcgtgaccgctacacttgccagcgccctagcgcccgctcctttcgctttcttcccttcctttctcgccacgttcgccggctttccccgtcaagctctaaatcgggggctccctttagggttccgatttagtgctttacggcacctcgaccccaaaaaacttgattagggtgatggttcacgtagtgggccatcgccctgatagacggtttttcgccctttgacgttggagtccacgttctttaatagtggactcttgttccaaactggaacaacactcaaccctatctcggtctattcttttgatttataagggattttgccgatttcggcctattggttaaaaaatgagctgatttaacaaaaatttaacgcgaattttaacaaaatattaacgtttacaatttcaggtggcacttttcggggaaatgtgcgcggaacccctatttgtttatttttctaaatacattcaaatatgtatccgctcatgaattaattcttagaaaaactcatcgagcatcaaatgaaactgcaatttattcatatcaggattatcaataccatatttttgaaaaagccgtttctgtaatgaaggagaaaactcaccgaggcagttccataggatggcaagatcctggtatcggtctgcgattccgactcgtccaacatcaatacaacctattaatttcccctcgtcaaaaataaggttatcaagtgagaaatcaccatgagtgacgactgaatccggtgagaatggcaaaagtttatgcatttctttccagacttgttcaacaggccagccattacgctcgtcatcaaaatcactcgcatcaaccaaaccgttattcattcgtgattgcgcctgagcgagacgaaatacgcgatcgctgttaaaaggacaattacaaacaggaatcgaatgcaaccggcgcaggaacactgccagcgcatcaacaatattttcacctgaatcaggatattcttctaatacctggaatgctgttttcccggggatcgcagtggtgagtaaccatgcatcatcaggagtacggataaaatgcttgatggtcggaagaggcataaattccgtcagccagtttagtctgaccatctcatctgtaacatcattggcaacgctacctttgccatgtttcagaaacaactctggcgcatcgggcttcccatacaatcgatagattgtcgcacctgattgcccgacattatcgcgagcccatttatacccatataaatcagcatccatgttggaatttaatcgcggcctagagcaagacgtttcccgttgaatatggctcataacaccccttgtattactgtttatgtaagcagacagttttattgttcatgaccaaaatcccttaacgtgagttttcgttccactgagcgtcagaccccgtagaaaagatcaaaggatcttcttgagatcctttttttctgcgcgtaatctgctgcttgcaaacaaaaaaaccaccgctaccagcggtggtttgtttgccggatcaagagctaccaactctttttccgaaggtaactggcttcagcagagcgcagataccaaatactgtccttctagtgtagccgtagttaggccaccacttcaagaactctgtagcaccgcctacatacctcgctctgctaatcctgttaccagtggctgctgccagtggcgataagtcgtgtcttaccgggttggactcaagacgatagttaccggataaggcgcagcggtcgggctgaacggggggttcgtgcacacagcccagcttggagcgaacgacctacaccgaactgagatacctacagcgtgagctatgagaaagcgccacgcttcccgaagggagaaaggcggacaggtatccggtaagcggcagggtcggaacaggagagcgcacgagggagcttccagggggaaacgcctggtatctttatagtcctgtcgggtttcgccacctctgacttgagcgtcgatttttgtgatgctcgtcaggggggcggagcctatggaaaaacgccagcaacgcggcctttttacggttcctggccttttgctggccttttgctcacatgttctttcctgcgttatcccctgattctgtggataaccgtattaccgcctttgagtgagctgataccgctcgccgcagccgaacgaccgagcgcagcgagtcagtgagcgaggaagcggaagagcgcctgatgcggtattttctccttacgcatctgtgcggtatttcacaccgcatatatggtgcactctcagtacaatctgctctgatgccgcatagttaagccagtatacactccgctatcgctacgtgactgggtcatggctgcgccccgacacccgccaacacccgctgacgcgccctgacgggcttgtctgctcccggcatccgcttacagacaagctgtgaccgtctccgggagctgcatgtgtcagaggttttcaccgtcatcaccgaaacgcgcgaggcagctgcggtaaagctcatcagcgtggtcgtgaagcgattcacagatgtctgcctgttcatccgcgtccagctcgttgagtttctccagaagcgttaatgtctggcttctgataaagcgggccatgttaagggcggttttttcctgtttggtcactgatgcctccgtgtaagggggatttctgttcatgggggtaatgataccgatgaaacgagagaggatgctcacgatacgggttactgatgatgaacatgcccggttactggaacgttgtgagggtaaacaactggcggtatggatgcggcgggaccagagaaaaatcactcagggtcaatgccagcgcttcgttaatacagatgtaggtgttccacagggtagccagcagcatcctgcgatgcagatccggaacataatggtgcagggcgctgacttccgcgtttccagactttacgaaacacggaaaccgaagaccattcatgttgttgctcaggtcgcagacgttttgcagcagcagtcgcttcacgttcgctcgcgtatcggtgattcattctgctaaccagtaaggcaaccccgccagcctagccgggtcctcaacgacaggagcacgatcatgcgcacccgtggggccgccatgccggcgataatggcctgcttctcgccgaaacgtttggtggcgggaccagtgacgaaggcttgagcgagggcgtgcaagattccgaataccgcaagcgacaggccgatcatcgtcgcgctccagcgaaagcggtcctcgccgaaaatgacccagagcgctgccggcacctgtcctacgagttgcatgataaagaagacagtcataagtgcggcgacgatagtcatgccccgcgcccaccggaaggagctgactgggttgaaggctctcaagggcatcggtcgagatcccggtgcctaatgagtgagctaacttacattaattgcgttgcgctcactgcccgctttccagtcgggaaacctgtcgtgccagctgcattaatgaatcggccaacgcgcggggagaggcggtttgcgtattgggcgccagggtggtttttcttttcaccagtgagacgggcaacagctgattgcccttcaccgcctggccctgagagagttgcagcaagcggtccacgctggtttgccccagcaggcgaaaatcctgtttgatggtggttaacggcgggatataacatgagctgtcttcggtatcgtcgtatcccactaccgagatatccgcaccaacgcgcagcccggactcggtaatggcgcgcattgcgcccagcgccatctgatcgttggcaaccagcatcgcagtgggaacgatgccctcattcagcatttgcatggtttgttgaaaaccggacatggcactccagtcgccttcccgttccgctatcggctgaatttgattgcgagtgagatatttatgccagccagccagacgcagacgcgccgagacagaacttaatgggcccgctaacagcgcgatttgctggtgacccaatgcgaccagatgctccacgcccagtcgcgtaccgtcttcatgggagaaaataatactgttgatgggtgtctggtcagagacatcaagaaataacgccggaacattagtgcaggcagcttccacagcaatggcatcctggtcatccagcggatagttaatgatcagcccactgacgcgttgcgcgagaagattgtgcaccgccgctttacaggcttcgacgccgcttcgttctaccatcgacaccaccacgctggcacccagttgatcggcgcgagatttaatcgccgcgacaatttgcgacggcgcgtgcagggccagactggaggtggcaacgccaatcagcaacgactgtttgcccgccagttgttgtgccacgcggttgggaatgtaattcagctccgccatcgccgcttccactttttcccgcgttttcgcagaaacgtggctggcctggttcaccacgcgggaaacggtctgataagagacaccggcatactctgcgacatcgtataacgttactggtttcacattcaccaccctgaattgactctcttccgggcgctatcatgccataccgcgaaaggttttgcgccattcgatggtgtccgggatctcgacgctctcccttatgcgactcctgcattaggaagcagcccagtagtaggttgaggccgttgagcaccgccgccgcaaggaatggtgcatgcaaggagatggcgcccaacagtcccccggccacggggcctgccaccatacccacgccgaaacaagcgctcatgagcccgaagtggcgagcccgatcttccccatcggtgatgtcggcgatataggcgccagcaaccgcacctgtggcgccggtgatgccggccacgatgcgtccggcgtagaggatcgagatctcgatcccgcgaaattaatacgactcactataggggaattgtgagcggataacaattcccctctagaaataattttgtttaactttaagaaggagatatacatatgcagcatcaccaccatcaccacggagtacagcttcaagacaatgggtataatggattgctcattgcaattaatcctcaggtacctgagaatcagaacctcatctcaaacattaaggaaatgataactgaagcttcattttacctatttaatgctaccaagagaagagtatttttcagaaatataaagattttaatacctgccacatggaaagctaataataacagcaaaataaaacaagaatcatatgaaaaggcaaatgtcatagtgactgactggtatggggcacatggagatgatccatacaccctacaatacagagggtgtggaaaagagggaaaatacattcatttcacacctaatttcctactgaatgataacttaacagctggctacggatcacgaggccgagtgtttgtccatgaatgggcccacctccgttggggtgtgttcgatgagtataacaatgacaaacctttctacataaatgggcaaaatcaaattaaagtgacaaggtgttcatctgacatcacaggcatttttgtgtgtgaaaaaggtccttgcccccaagaaaactgtattattagtaagctttttaaagaaggatgcacctttatctacaatagcacccaaaatgcaactgcatcaataatgttcatgcaaagtttatcttctgtggttgaattttgtaatgcaagtacccacaaccaagaagcaccaaacctacagaaccagatgtgcagcctcagaagtgcatgggatgtaatcacagactctgctgactttcaccacagctttcccatgaacgggactgagcttccacctcctcccacattctcgcttgtagaggctggtgacaaagtggtctgtttagtgctggatgtgtccagcaagatggcagaggctgacagactccttcaactacaacaagccgcagaattttatttgatgcagattgttgaaattcataccttcgtgggcattgccagtttcgacagcaaaggagagatcagagcccagctacaccaaattaacagcaatgatgatcgaaagttgctggtttcatatctgcccaccactgtatcagctaaaacagacatcagcatttgttcagggcttaagaaaggatttgaggtggttgaaaaactgaatggaaaagcttatggctctgtgatgatattagtgaccagcggagatgataagcttcttggcaattgcttacccactgtgctcagcagtggttcaacaattcactccattgccctgggttcatctgcagccccaaatctggaggaattatcacgtcttacaggaggtttaaagttctttgttccagatatatcaaactccaatagcatgattgatgctttcagtagaatttcctctggaactggagacattttccagcaacatattcagcttgaaagtacaggtgaaaatgtcaaacctcaccatcaattgaaaaacacagtgactgtggataatactgtgggcaacgacactatgtttctagttacgtggcaggccagtggtcctcctgagattatattatttgatcctgatggacgaaaatactacacaaataattttatcaccaatctaacttttcggacagctagtctttggattccaggaacagctaagcctgggcactggacttacaccctgaacaatacccatcattctctgcaagccctgaaagtgacagtgacctctcgcgcctccaactcagctgtgcccccagccactgtggaagcctttgtggaaagagacagcctccattttcctcatcctgtgatgatttatgccaatgtgaaacagggattttatcccattcttaatgccactgtcactgccacagttgagccagagactggagatcctgttacgctgagactccttgatgatggagcaggtgctgatgttataaaaaatgatggaatttactcgaggtattttttctcctttgctgcaaatggtagatatagcttgaaagtgcatgtcaatcactctcccagcataagcaccccagcccactctattccagggagtcatgctatgtatgtaccaggttacacagcaaacggtaatattcagatgaatgctccaaggaaatcagtaggcagaaatgaggaggagcgaaagtggggctttagccgagtcagctcaggaggctccttttcagtgctgggagttccagctggcccccaccctgatgtgtttccaccatgcaaaattattgacctggaagctgtaaaagtagaagaggaattgaccctatcttggacagcacctggagaagactttgatcagggccaggctacaagctatgaaataagaatgagtaaaagtctacagaatatccaagatgactttaacaatgctattttagtaaatacatcaaagcgaaatcctcagcaagctggcatcagggagatatttacgttctcaccccaaatttccacgaatggacctgaacatcagccaaatggagaaacacatgaaagccacagaatttatgttgcaatacgagcaatggataggaactccttacagtctgctgtatctaacattgcccaggcgcctctgtttattccccccaattctgatcctgtacctgccagagattatcttatattgaaaggagttttaacagcaatgggtttgataggaatcatttgccttattatagttgtgacacatcatactttaagcaggaaaaagagagcagacaagaaagagaatggaacaaaattattataatgaattctgcagatatccatcacactggcggccgctcgagcaccaccaccaccaccactgagatccggctgctaacaaagcccgaaaggaagctgagttggctgctgccaccgctgagcaataactagcataaccccttggggcctctaaacgggtcttgaggggttttttgctgaaaggaggaactatatccggat

SEQ ID NO: 255 - DNA, 401 bp, Homo sapiens
  misc_feature 9, 67, 247, 275, 277, 397: n = A,T,C or G
gtggccagngactagaaggcgaggcgccgcgggaccatggcggcggcggcggacgagcggagtccanaggacggagaagacgaggaagaggaggagcagttggttctggtggaattatcaggaattattgattcagacttcctctcaaaatgtgaaaataaatgcaaggttttgggcattgacactgagaggcccattctgcaagtggacagctgtgtctttgctggggagtatgaagacactctanggacctgtgttatatttgaagaaaatgntnaacatgctgatacagaaggcaataataaaacagtgctaaaatataaatgccatacaatgaagaagctcagcatgacaagaactctcctgacagagaagaaggaaggagaagaaaacatangtgg

SEQ ID NO: 256 - DNA, 401 bp, Homo sapiens
  misc_feature 7, 37, 51, 79, 96, 98, 103, 104, 107, 116, 167, 181, 183,194, 206, 276, 303, 307, 308, 310, 323, 332, 341, 353, 374,376: n = A,T,C or G
tggtggncctgggatggggaaccgcggtggcttccgnggaggtttcggcantggcatccggggccggggtcgcggccgnggacggggccggggccnangccgnnganctcgcggangcaaggccgaggataaggagtggatgcccgtcaccaacttgggccgcttgnccaaggacatgaanancaagcccctgnaggagatctatntcttcttccctgccccattaaggaatcaagagatcatttgatttcttcctgggggcctctctcaaggatnaggtttttgaagattatgccagtgcanaaannanaccccgttgcccngtccatctncacccaacncttccaagggcnatttttgtttaggcctcattncnggggggaaccttaacccaatttggg

SEQ ID NO: 257 - DNA, 401 bp, Homo sapiens
  misc_feature 382, 387: n = A,T,C or G
atgtatgtaaaacacttcataaaatgtaaagggctataacaaatatgttataaagtgattctctcagccctgaggtatacagaatcatttgcctcagactgctgttggattttaaaatttttaaaatatctgctaagtaatttgctatgtcttctcccacactatcaatatgcctgcttctaacaggctccccactttcttttaatgtgctgttatgagctttggacatgagataaccgtgcctgttcagagtgtctacagtaagagctggacaaactctggagggacacagtctttgagacagctcttttggttgctttccacttttctgaaaggttcacagtaaccttctagataatagaaactcccagttaaagcctangctancaattttttttagt

SEQ ID NO: 258 - DNA, 401 bp, Homo sapiens
ggagcgctaggtcggtgtacgaccgagattagggtgcgtgccagctccgggaggccgcggtgaggggccgggcccaagctgccgacccgagccgatcgtcagggtcgccagcgcctcagctctgtggaggagcagcagtagtcggagggtgcaggatattagaaatggctactccccagtcaattttcatctttgcaatctgcattttaatgataacagaattaattctggcctcaaaaagctactatgatatcttaggtgtgccaaaatcggcatcagagcgccaaatcaagaaggcctttcacaagttggccatgaagtaccaccctgacaaaaataagacccagatgctgaagcaaaattcagagagattgcagaagcatatgaaacactctcagatg

SEQ ID NO: 259 - DNA, 401 bp, Homo sapiens
attgggtttggagggaggatgatgacagaggaatgccctttggccatcacggttttgattctccagaatattgtgggtttgatcatcaatgcagtcatgttaggctgcattttcatgaaaacagctcaggctcacagaagggcagaaactttgattttcagccgccatgctgtgattgccgtccgaaatggcaagctgtgcttcatgttccgagtgggtgacctgaggaaaagcatgatcattagtgcctctgtgcgcatccaggtggtcaagaaaacaactacacctgaaggggaggtggttcctattcaccaactggacattcctgttgataacccaatcgagagcaataacatttttctggtggcccctttgatcatctgccacgtgattgacaagcg

SEQ ID NO: 260 - DNA, 363 bp, Homo sapiens
  misc_feature 7, 9, 19, 41, 63, 73, 106, 111, 113, 116, 119, 156, 158,162, 187, 247, 288, 289, 290, 292, 298, 299, 300, 340: n = A,T,C or G
aggagananggaggggganatgaatagggatggagaggganatagtggatgagcagggcacanggagaggaancagaaaggagaggcaagacagggagacacacancacananganganacaggtgggggctggggtggggcatggagagcctttnangtcncccaggccaccctgctctcgctggnctgttgaaacccactccatggcttcctgccactgcagttgggcccagggctggcttattnctggaatgcaagtggctgtggcttggagcctcccctctggnnnanggaaannnattgctcccttatctgcttggaatatctgagtttttccancccggaaataaaacacacacaca

SEQ ID NO: 261 - DNA, 401 bp, Homo sapiens
  misc_feature 114, 152: n = A,T,C or G
cggctctccgccgctctcccggggtttcggggcacttgggtcccacagtctggtcctgcttcaccttcccctgacctgagtagtcgccatggcacaggttctcagaggcactgngactgacttccctggatttgatgagcgggctgatgcanaaactcttcggaaggctatgaaaggcttgggcacagatgaggagagcatcctgactctgttgacatcccgaagtaatgctcagcgccaggaaatctctgcagcttttaagactctgtttggcagggatcttctggatgacctgaaatcagaactaactggaaaatttgaaaaattaattgtggctctgatgaaaccctctcggctttatgatgcttatgaactgaaacatgccttgaagggagctggaa

SEQ ID NO: 262 - DNA, 401 bp, Homo sapiens
  misc_feature 7, 26, 258, 305, 358, 373, 374, 378: n = A,T,C or G
agtctanaacatttctaatattttgngctttcatatatcaaaggagattatgtgaaactatttttaaatactgtaaagtgacatatagttataagatatatttctgtacagtagagaaagagtttataacatgaagaatattgtaccattatacattttcattctcgatctcataagaaattcaaaagaataatgatagaggtgaaaatatgtttactttctctaaatcaagcctagttgtcaactcaaaaattatgntgcatagttttattttgaatttaggttttgggactacttttttccancttcaatgagaaaataaaatctacaactcaggagttactacagaagttctaantatttttttgctaannagcnaaaaatataaacatatgaaaatg

SEQ ID NO: 263 - DNA, 401 bp, Homo sapiens
  misc_feature 232, 290, 304, 326, 383: n = A,T,C or G
ctgtccgaccaagagaggccggccgagcccgaggcttgggcttttgctttctggcggagggatctgcggcggtttaggaggcggcgctgatcctgggaggaagaggcagctacggcggcggcggcggtggcggctagggcggcggcgaataaaggggccgccgccgggtgatgcggtgaccactgcggcaggcccaggagctgagtgggccccggccctcagcccgtcccgncggacccgctttcctcaactctccatcttctcctgccgaccgagatcgccgaggcggnctcaggctccctanccccttccccgtcccttccccncccccgtccccgccccgggggccgccgccacccgcctcccaccatggctctgaaganaatccacaaggaattgaa

SEQ ID NO: 264 - DNA, 401 bp, Homo sapiens
aacaccagccactccaggacccctgaaggcctctaccaggtcaccagtgttctgcgcctaaagccaccccctggcagaaacttcagctgtgtgttctggaatactcacgtgagggaacttactttggccagcattgaccttcaaagtcagatggaacccaggacccatccaacttggctgcttcacattttcatcccctcctgcatcattgctttcattttcatagccacagtgatagccctaagaaaacaactctgtcaaaagctgtattcttcaaaagacacaacaaaaagacctgtcaccacaacaaagagggaagtgaacagtgctgtgaatctgaacctgtggtcttgggagccagggtgacctgatatgacatctaaagaagcttctggactctg

SEQ ID NO: 265 - DNA, 271 bp, Homo sapiens
  misc_feature 59: n = A,T,C or G
gccacttcctgtggacatgggcagagcgctgctgccagttcctggtagccttgaccacnacgctggggggtctttgtgatggtcatgggtctcatttgcacttgggggtgtgggattcaagttagaagtttctagatctggccgggcgcagtggctcacacctgtaatcccagcactttaggaggctgaggcaggcggatcatgaggtcaggagatcgagaccgtcctggctaacacagtgaaaccccgtctctactaaaaatacaaaaaa

SEQ ID NO: 266 - DNA, 401 bp, Homo sapiens
  misc_feature 45: n = A,T,C or G
attcataaatttagctgaaagatactgattcaatttgtatacagngaatataaatgagacgacagcaaaattttcatgaaatgtaaaatatttttatagtttgttcatactatatgaggttctattttaaatgactttctggattttaaaaaatttctttaaatacaatcatttttgtaatatttattttatgcttatgatctagataattgcagaatatcattttatctgactctgtcttcataagagagctgtggccgaattttgaacatctgttatagggagtgatcaaattagaaggcaatgtggaaaaacaattctgggaaagatttctttatatgaagtccctgccactagccagccatcctaattgatgaaagttatctgttcacaggcctgca

SEQ ID NO: 267 - DNA, 401 bp, Homo sapiens
  misc_feature 116, 247, 277, 296, 307, 313, 322, 323, 336, 342, 355, 365,377, 378, 397: n = A,T,C or G
gaagaggcatcacctgatcccggagacctttggagttaagaggcggcggaagcgagggcctgtggagtcggatcctcttcggggtgagccagggtcggcgcgcgcggctgtctcanaactcatgcagctgttcccgcgaggcctgtttgaggacgcgctgccgcccatcgtgctgaggagccaggtgtacagccttgtgcctgacaggaccgtggccgaccggcagctgaaggagcttcaagagcanggggagacaaaatcgtccagctgggcttcnacttggatgcccatggaanttattctttcncttganggacttacnngggacccaagaancccttncaaggggcccttngtggatgggncccgaaaccccnntatttgcccttgggggggnccaa

SEQ ID NO: 268 - DNA, 223 bp, Homo sapiens
tcgccatgttggccaggctggtcttgaactcctgactttaagtgatccacccgcctcaacctcccaaagtgctgggattacaggtgtgagccaccgcgcctggcctgatacatacttttagaatcaagtagtcacgcactttttctgttcatttttctaaaaagtaaatatacaaatgttttgttttttgttttttttgtttgtttgtttctgtttttttttt

SEQ ID NO: 269 - DNA, 401 bp, Homo sapiens
actatgtaaaccacattgtacttttttttactttggcaacaaatatttatacatacaagatgctagttcatttgaatatttctcccaacttatccaaggatctccagctctaacaaaatggtttatttttatttaaatgtcaatagttgttttttaaaatccaaatcagaggtgcaggccaccagttaaatgccgtctatcaggttttgtgccttaagagactacagagtcaaagctcatttttaaaggagtaggacaaagttgtcacaggtttttgttgttgtttttattgcccccaaaattacatgttaatttccatttatatcagggattctatttacttgaagactgtgaagttgccattttgtctcattgttttctttgacataactaggatccat

SEQ ID NO: 270 - DNA, 401 bp, Homo sapiens
  misc_feature 240, 382: n = A,T,C or G
tggctgttgattcacctcagcactgcttggtatctgcaccctacctctctttagaggctgccttgtcaactgaaaaatgcacctgacttcgagcaagactctttccttaggttctggatctgtttgagccccatggcactgagctggaatctgagggtcttgttccaaggatgtgatgatgtgggagaatgttctttgaaagagcagaaatccagtctgcatggaaacagcctgtagagnagaagtttccagtgataagtgttcactgttctaaggaggtacaccacagctacctgaattttcccaaaatgagtgcttctgtgcgttacaactggcctttgtacttgactgtgatgactttgttttttcttttcaattctanatgaacatgggaaaaaatg

SEQ ID NO: 271 - DNA, 329 bp, Homo sapiens
ccacagcctccaagtcaggtggggtggagtcccagagctgcacagggtttggcccaagtttctaagggaggcacttcctcccctcgcccatcagtgccagcccctgctggctggtgcctgagcccctcagacagccccctgccccgcaggcctgccttctcagggacttctgcggggcctgaggcaagccatggagtgagacccaggagccggacacttctcaggaaatggcttttcccaacccccagcccccacccggtggttcttcctgttctgtgactgtgtatagtgccaccacagcttatggcatctcattgaggacaaaaaaa

SEQ ID NO: 272 - DNA, 401 bp, Homo sapiens
  misc_feature 1, 7, 12, 21, 61, 62, 66, 72, 78, 88, 90, 92, 98, 117, 119,128, 130, 134, 142, 144, 151, 159, 162, 164, 168, 169, 177,184, 185, 188, 194, 202, 204, 209, 213, 218, 223, 231, 260,272, 299, 300, 306, 321, 322, 323, 331, 335, 336, 338: n = A,T,C or G
  misc_feature 341, 342, 343, 345, 346, 351, 358, 360, 362, 363, 387, 390,392: n = A,T,C or G
nggctgntaacntcggaggtnacttcctggactatcctggagaccccctccgcttccacgnncatnatatcnctcatngctgggcccntnangacacnatcccactccaacacctgngngatgctggncncctnggaaccancntcagaangaccctgntcntntgtnntccgcaanctgaagnnaangcgggntacacctncntgcantggnccacnctgcngggaactntacacacctacgggatgtggctgcgccangagccaagagcntttctggatgattccccagcctcttgnnagggantctacaacattgctnnntacctttntccnncngcnnntnntggantacaggngntnntaacactacatcttttttactgcnccntncttggtggg

SEQ ID NO: 273 - DNA, 401 bp, Homo sapiens
  misc_feature 399: n = A,T,C or G
cagcaccatgaagatcaagatcatcgcacccccagagcgcaagtactcggtgtggatcggtggctccatcctggcctcactgtccaccttccagcagatgtggattagcaagcaggagtacgacgagtcgggcccctccatcgtccaccgcaaatgcttctaaacggactcagcagatgcgtagcatttgctgcatgggttaattgagaatagaaatttgcccctggcaaatgcacacacctcatgctagcctcacgaaactggaataagccttcgaaaagaaattgtccttgaagcttgtatctgatatcagcactggattgtagaacttgttgctgattttgaccttgtattgaagttaactgttccccttggtattaacgtgtcagggctgagtgntc

SEQ ID NO: 274 - DNA, 401 bp, Homo sapiens
ccacccacacccaccgcgccctcgttcgcctcttctccgggagccagtccgcgccaccgccgccgcccaggccatcgccaccctccgcagccatgtccaccaggtccgtgtcctcgtcctcctaccgcaggatgttcggcggcccgggcaccgcgagccggccgagctccagccggagctacgtgactacgtccacccgcacctacagcctgggcagcgcgctgcgccccagcaccagccgcagcctctacgcctcgtccccgggcggcgtgtatgccacgcgctcctctgccgtgcgcctgcggagcagcgtgcccggggtgcggctcctgcaggactcggtggacttctcgctggccgacgccatcaacaccgagttcaagaacacccgcaccaacgag

SEQ ID NO: 275 - DNA, 401 bp, Homo sapiens
ccacttccaccactttgtggagcagtgccttcagcgcaacccggatgccaggtatccctgctggcctgggcctgggcttcgggagagcagagggtgctcaggagggtaaggccagggtgtgaagggacttacctcccaaaggttctgcaggggaatctggagctacacacaggagggatcagctcctgggtgtgtcagaggccagcctggggagctctggccactgcttcccatgagctgagggagagggagaggggacccgaggctgaggcataagtggcaggatttcgggaagctggggacacggcagtgatgctgcggtctctcctcccctttccctccaggcccagtgccagcaccctcctgaaccactctttcttcaagcagatcaagcgacgtgc

SEQ ID NO: 276 - DNA, 401 bp, Homo sapiens
  misc_feature 11: n = A,T,C or G
tctgatattgntacccttgagccacctaagttagaagaaattggaaatcaagaagttgtcattgttgaagaagcacagagttcagaagactttaacatgggctcttcctctagcagccagtatactttctgtcagccagaaactgtattttcatctcagcctagtgatgatgaatcaagtagtgatgaaaccagtaatcagcccagtcctgcctttagacgacgccgtgctaggaagaagaccgtttctgcttcagaatctgaagaccggctagttggtgaacaagaaactgaaccttctaaggagttgagtaaacgtcagttcagtagtggtctcaataagtgtgttatacttgctttggtgattgcaatcagcatgggatttggccatttctatggcac

SEQ ID NO: 277 - DNA, 401 bp, Homo sapiens
  misc_feature 227, 333: n = A,T,C or G
aactttggcaacatatctcagcaaaaactacagctatgttattcatgccaaaataaaagctgtgcagaggagtggctgcaatgaggtcacaacggtggtggatgtaaaagagatcttcaagtcctcatcacccatccctcgaactcaagtcccgctcattacaaattcttcttgccagtgtccacacatcctgccccatcaagatgttctcatcatgtgttacgagnggcgctcaaggatgatgcttcttgaaaattgcttagttgaaaaatggagagatcagcttagtaaaagatccatacagtgggaagagaggctgcaggaacagcgganaacagttcaggacaagaagaaaacagccgggcgcaccagtcgtagtaatccccccaaaccaaagggaa

SEQ ID NO: 278 - DNA, 401 bp, Homo sapiens
  misc_feature 322, 354: n = A,T,C or G
aatgagtgtgagaccacaaatgaatgccgggaggatgaaatgtgttggaattatcatggcggcttccgttgttatccacgaaatccttgtcaagatccctacattctaacaccagagaaccgatgtgtttgcccagtctcaaatgccatgtgccgagaactgccccagtcaatagtctacaaatacatgagcatccgatctgataggtctgtgccatcagacatcttccagatacaggccacaactatttatgccaacaccatcaatacttttcggattaaatctggaaatgaaaatggagagtctacctacgacaacaaanccctgtaagtgcaatgcttgtgctcgtgaagncattatcaggaccaagagaacatatcgtggacctggagatgctgaca

SEQ ID NO: 279 - DNA, 401 bp, Homo sapiens
  misc_feature 30, 35, 81, 88, 180, 212, 378, 384, 391: n = A,T,C or G
aaattattgcctctgatacatacctaagtnaacanaacattaatacctaagtaaacataacattacttggagggttgcagnttctaantgaaactgtatttgaaacttttaagtatactttaggaaacaagcatgaacggcagtctagaataccagaaacatctacttgggtagcttggngccattatcctgtggaatctgatatgtctggnagcatgtcattgatgggacatgaagacatctttggaaatgatgagattatttcctgtgttaaaaaaaaaaaaaatcttaaattcctacaatgtgaaactgaaactaataattttgatcctgatgtatgggacagcgtatctgtaccaggctctaaataacaaaagntagggngacaagnacatgttcct

SEQ ID NO: 280 - DNA, 326 bp, Homo sapiens
gaagtggaattgtataattcaattcgataattgatctcatgggctttccctggaggaaaggttttttttgttgttttttttttaagaacttgaaacttgtaaactgagatgtctgtagcttttttgcccatctgtagtgtatgtgaagatttcaaaacctgagagcactttttctttgtttagaattatgagaaaggcactagatgactttaggatttgcatttttccctttattgcctcatttcttgtgacgccttgttggggagggaaatctgtttattttttcctacaaataaaaagctaagattctatatcgcaaaaaaaaa

SEQ ID NO: 281 - DNA, 374 bp, Homo sapiens
caacgcgtttgcaaatattcccctggtagcctacttccttacccccgaatattggtaagatcgagcaatggcttcaggacatgggttctcttctcctgtgatcattcaagtgctcactgcatgaagactggcttgtctcagtgtttcaacctcaccagggctgtctcttggtccacacctcgctccctgttagtgccgtatgacagcccccatcaaatgaccttggccaagtcacggtttctctgtggtcaaggttggttggctgattggtggaaagtagggtggaccaaaggaggccacgtgagcagtcagcaccagttctgcaccagcagcgcctccgtcctagtgggtgttcctgtttctcctggccctgg

SEQ ID NO: 282 - DNA, 404 bp, Homo sapiens
  misc_feature 26, 27, 51, 137, 180, 222: n = A,T,C or G
agtgtggtggaattcccgcatcctanncgccgactcacacaaggcagagtngccatggagaaaattccagtgtcagcattcttgctccttgtggccctctcctacactctggccagagataccacagtcaaacctgnagccaaaaaggacacaaaggactctcgacccaaactgccccanaccctctccagaggttggggtgaccaactcatctggactcanacatatgaagaagctctatataaatccaagacaagcaacaaacccttgatgattattcatcacttggatgagtgcccacacagtcaagctttaaagaaagtgtttgctgaaaataaagaaatccagaaattggcagagcagtttgtcctcctcaatctggtttatgaaacaactgacaaaca

SEQ ID NO: 283 - DNA, 184 bp, Homo sapiens
  misc_feature 26: n = A,T,C or G
agtgtggtggaattcacttgcttaanttgtgggcaaaagagaaaaagaaggattgatcagagcattgtgcaatacagtttcattaactccttccctcgctcccccaaaaatttgaatttttttttcaacactcttacacctgttatggaaaatgtcaacctttgtaagaaaaccaaaataaaaa

SEQ ID NO: 284 - DNA, 421 bp, Homo sapiens
  misc_feature 147, 149: n = A,T,C or G
ctattaatcctgccacaatatttttaattacgtacaaagatctgacatgtcacccagggacccatttcacccactgctctgtttggccgccagtcttttgtctctctcttcagcaatggtgaggcggataccctttcctcggggaananaaatccatggtttgttgcccttgccaataacaaaaatgttggaaagtcgagtggcaaagctgttgccattggcatctttcacgtgaaccacgtcaaaagatccagggtgcctctctctgttggtgatcacaccaattcttcctaggttagcacctccagtcaccatacacaggttaccagtgtcgaacttgatgaaatcagtaatcttgccagtctctaaatcaatctgaatggtatcattcaccttgatgaggggatcggggtagcggatg

SEQ ID NO: 285 - DNA, 361 bp, Homo sapiens
  misc_feature 34, 188: n = A,T,C or G
ctgggtggtaactctttatttcattgtccggaanaaagatgggagtgggaacagggtggacactgtgcaggcttcagcttccactccgggcaggattcaggctatctgggaccgcagggactgccaggtgcacagccctggctcccgaggcaggcaggcaaggtgacgggactggaagcccttttcanagccttggaggagctggtccgtccacaagcaatgagtgccactctgcagtttgcaggggatggataaacagggaaacactgtgcattcctcacagccaacagtgtaggtcttggtgaagccccggcgctgagctaagctcaggctgttccagggagccacgaaactgcaggta

SEQ ID NO: 286 - DNA, 336 bp, Homo sapiens
  misc_feature 40, 68, 75, 127, 262: n = A,T,C or G
tttgagtggcagcgcctttatttgtgggggccttcaaggnagggtcgtggggggcagcggggaggaanagccganaaactgtgtgaccggggcctcaggtggtgggcattgggggctcctcttgcanatgcccattggcatcaccggtgcagccattggtggcagcgggtaccggtcctttcttgttcaacatagggtaggtggcagccacgggtccaactcgcttgaggctgggccctgggcgctccattttgtgttccangagcatgtggttctgtggcgggagccccacgcaggccctgaggatgttctcgatgcagctgcgctggcggaaaa

SEQ ID NO: 287 - DNA, 301 bp, Homo sapiens
  misc_feature 15, 33, 44, 53, 76, 83, 107, 117, 154, 166, 192, 194, 207,215, 241, 246: n = A,T,C or G
tgggtaccaaatttntttatttgaaggaatggnacaaatcaaanaacttaagnggatgttttggtacaacttatanaaaaggnaaaggaaaccccaacatgcatgcnctgccttggngaccagggaagtcaccccacggctatggggaaattancccgaggcttanctttcattatcactgtctcccagggngngcttgtcaaaaanatattccnccaagccaaattcgggcgctcccatnttgcncaagttggtcacgtggtcacccaattctttgatggctttcacctgctcattcagg

SEQ ID NO: 288 - DNA, 358 bp, Homo sapiens
  misc_feature 39, 143, 226: n = A,T,C or G
aagtttttaaactttttatttgcatattaaaaaaattgngcattccaataattaaaatcatttgaacaaaaaaaaaaatggcactctgattaaactgcattacagcctgcaggacaccttgggccagcttggttttactctanatttcactgtcgtcccaccccacttcttccaccccacttcttccttcaccaacatgcaagttctttccttccctgccagccanatagatagacagatgggaaaggcaggcgcggccttcgttgtcagtagttctttgatgtgaaaggggcagcacagtcatttaaacttgatccaacctctttgcatcttacaaagttaaacagctaaaagaagt

SEQ ID NO: 289 - DNA, 462 bp, Homo sapiens
  misc_feature 87, 141, 182, 220, 269, 327: n = A,T,C or G
ggcatcagaaatgctgtttatttctctgctgctcccaagctggctggcctttgcagaggagcagacaacagatgcatagttgggganaaagggaggacaggttccaggatagagggtgcaggctgagggaggaagggtaanaggaaggaaggccatcctggatccccacatttcagtctcanatgaggacaaagggactcccaagcccccaaatcatcanaaaacaccaaggagcaggaggagcttgagcaggccccagggagcctcanagccataccagccactgtctacttcccatcctcctctcccattccctgtctgcttcanaccacctcccagctaagccccagctccattcccccaatcctggcccttgccagcttgacagtcacagtgcctggaattccaccactgaggcttctcccagttggattaggacgtcgccctgttagcatgctgccc

SEQ ID NO: 290 - DNA, 481 bp, Homo sapiens
  misc_feature 44, 57, 122, 158, 304, 325, 352, 405: n = A,T,C or G
tactttcctaaactttattaaagaaaaaagcaataagcaatggnggtaaatctctanaacatacccaattttctgggcttcctcccccgagaatgtgacattttgatttccaaacatgccanaagtgtatggttcccaactgtactaaagtaggtganaagctgaagtcctcaagtgttcatcttccaacttttcccagtctgtggtctgtctttggatcagcaataattgcctgaacagctactatggcttcgttgatttttgtctgtagctctctgagctcctctatgtgcagcaatcgcanaatttgagcagcttcattaanaactgcatctcctgtgtcaaaaccaanaatatgtttgtctaaagcaacaggtaagccctcttttgtttgatttgccttancaactgcatcctgtgtcaggcgctcctgaaccaaaatccgaattgccttaagcattaccaggtaatcatcatgacg

SEQ ID NO: 291 - DNA, 381 bp, Homo sapiens
  misc_feature 79, 166, 187, 208, 219, 315: n = A,T,C or G
tcatagtaatgtaaaaccatttgtttaattctaaatcaaatcactttcacaacagtgaaaattagtgactggttaaggngtgccactgtacatatcatcattttctgactggggtcaggacctggtcctagtccacaagggtggcaggaggagggtggaggctaanaacacagaaaacacacaaaanaaaggaaagctgccttggcanaaggatgaggnggtgagcttgccgaaggatggtgggaagggggctccctgttggggccgagccaggagtcccaagtcagctctcctgccttacttagctcctggcanagggtgagtggggacctacgaggttcaaaatcaaatggcatttggccagcctggctttactaacag

SEQ ID NO: 292 - DNA, 371 bp, Homo sapiens
  misc_feature 32, 55, 72, 151, 189, 292: n = A,T,C or G
gaaaaaataatccgtttaattgaaaaacctgnaggatactattccactcccccanatgaggaggctgagganaccaaacccctacatcacctcgtagccacttctgatactcttcacgaggcagcaggcaaagacaattcccaaaacctcnacaaaagcaattccaagggctgctgcagctaccaccancacatttttcctcagccagcccccaatcttctccacacagccctccttatggatcgccttctcgttgaaattaatcccacagcccacagtaacattaatgcancaggagtcggggactcggttcttcgacatggaagggattttctcccaatctgtgtagttagcagccccacagcacttaa

SEQ ID NO: 293 - DNA, 361 bp, Homo sapiens
  misc_feature 75, 196, 222: n = A,T,C or G
gatttaaaagaaaacactttattgttcagcaattaaaagttagccaaatatgtatttttctccataatttattgngatgttatcaacatcaagtaaaatgctcattttcatcatttgcttctgttcatgttttcttgaacacgtcttcaattttccttccaaaatgctgcatgccacacttgaggtaacgaagcanaagtatttttaaacatgacagctaanaacattcatctacagcaacctatatgctcaatacatgccgcgtgatcctagtagttttttcacaaccttctacaagtttttggaaaacatctgttatgatgactttcatacaccttcacctcaaaggctttcttgcacc

SEQ ID NO: 294 - DNA, 391 bp, Homo sapiens
  misc_feature 26, 77, 96, 150, 203, 252, 254, 264, 276: n = A,T,C or G
tattttaaagtttaattatgattcanaaaaaatcgagcgaataactttctctgaaaaaatatattgactctgtatanaccacagttattggggganaagggctggtaggttaaattatcctattttttattctgaaaatgatattaatanaaagtcccgtttccagtctgattataaagatacatatgcccaaaatggctganaataaatacaacaggaaatgcaaaagctgtaaagctaagggcatgcaananaaaatctcanaatacccaaagnggcaacaaggaacgtttggctggaatttgaagttatttcagtcatctttgtctttggctccatgtttcaggatgcgtgtgaactcgatgtaattgaaattcccctttttatcaat

SEQ ID NO: 295 - DNA, 343 bp, Homo sapiens
  misc_feature 145, 174, 205, 232: n = A,T,C or G
ttcttttgttttattgataacagaaactgtgcataattacagatttgatgaggaatctgcaaataataaagaatgtgtctactgccagcaaaatacaattattccatgccctctcaacatacaaatatagagttcttcacaccanatggctctggtgtaacaaagccattttanatgtttaattgtgcttctacaaaaccttcanagcatgaggtagtttcttttacctacnatattttccacatttccattattacacttttagtgagctaaaatccttttaacatagcctgcggatgatctttcacaaaagccaagcctcatttacaaagggtttatttct

SEQ ID NO: 296 - DNA, 241 bp, Homo sapiens
  misc_feature 96, 98, 106, 185: n = A,T,C or G
ttcttggatattggttgtttttgtgaaaaagtttttgtttttcttctcagtcaactgaattatttctctactttgccctcctgatgcccacatgananaacttaanataatttctaacagcttccactttggaaaaaaaaaaaacctgttttcctcatggaaccccaggagttgaaagtggatanatcgctctcaaaatctaaggctctgttcagctttacattatgttacctgacgtttt

SEQ ID NO: 297 - DNA, 391 bp, Homo sapiens
  misc_feature 12, 130: n = A,T,C or G
gttgtggctganaatgctggagatgctcagttctctccctcacaaggtaggccacaaattcttggtggtgccctcacatctggggtcttcaggcaccagccatgcctgccgaggagtgctgtcaggacanaccatgtccgtgctaggcccaggcacagcccaaccactcctcatccaagtctctcccaggtttctggtcccgatgggcaaggatgacccctccagtggctggtaccccaccatcccactacccctcacatgctctcactctccatcaggtccccaatcctggcttccctcttcacgaactctcaaagaaaaggaaggataaaacctaaataaaccagacagaagcagctctggaaaagtacaaaaagacagccagaggtgt

SEQ ID NO: 298 - DNA, 321 bp, Homo sapiens
  misc_feature 14, 30, 76, 116, 201, 288, 301: n = A,T,C or G
caagccaaactgtntccagctttattaaanatactttccataaacaatcatggtatttcaggcaggacatgggcanacaatcgttaacagtatacaacaactttcaaactcccttnttcaatggactaccaaaaatcaaaaagccactataaaacccaatgaagtcttcatctgatgctctgaacagggaaagtttaaagngagggttgacatttcacatttagcatgttgtttaacaacttttcacaagccgaccctgactttcaggaagtgaaatgaaaatggcanaatttatctgaanatccacaatctaaaaatgga

SEQ ID NO: 299 - DNA, 401 bp, Homo sapiens
  misc_feature 104, 268, 347: n = A,T,C or G
tatcataaagagtgttgaagtttatttattatagcaccattgagacattttgaaattggaattggtaaaaaaataaaacaaaaagcatttgaattgtatttggnggaacagcaaaaaaagagaagtatcatttttctttgtcaaattatactgtttccaaacattttggaaataaataactggaattttgtcggtcacttgcactggttgacaagattagaacaagaggaacacatatggagttaaattttttttgttgggatttcanatagagtttggtttataaaaagcaaacagggccaacgtccacaccaaattcttgatcaggaccaccaatgtcatagggngcaatatctacaataggtagtctcacagccttgcgtgttcgatattcaaagact

SEQ ID NO: 300 - DNA, 188 bp, Homo sapiens
  misc_feature 48: n = A,T,C or G
tgaatgctttgtcatattaagaaagttaaagtgcaataatgtttgaanacaataagtggtggtgtatcttgtttctaataagataaacttttttgtctttgctttatcttattagggagttgtatgtcagtgtataaaacatactgtgtggtataacaggcttaataaattctttaaaaggaaaaaaa

SEQ ID NO: 301 - DNA, 291 bp, Homo sapiens
aagattttgttttattttattatggctagaaagacactgttatagccaaaatcggcaatgacactaaagaaatcctctgtgcttttcaatatgcaaatatatttcttccaagagttgccctggtgtgacttcaagagttcatgttaacttcttttctggaaacttccttttcttagttgttgtattcttgaagagcctgggccatgaagagcttgcctaagttttgggcagtgaactccttgatgttctggcagtaagtgtttatctggcctgcaatgagcagcgagtcca

SEQ ID NO: 302 - DNA, 341 bp, Homo sapiens
  misc_feature 25: n = A,T,C or G
tgatttttcataattttattaaatnatcactgggaaaactaatggttcgcgtatcacacaattacactacaatctgataggagtggtaaaaccagccaatggaatccaggtaaagtacaaaaacgccaccttttattgtcctgtcttatttctcgggaaggagggttctactttacacatttcatgagccagcagtggacttgagttacaatgtgtaggttccttgtggttatagctgcagaagaagccatcaaattcttgaggacttgacatctctcggaaagaagcaaactagtggatcccccgggctgcaggaattcgatatcaagcttatcgatacc

SEQ ID NO: 303 - DNA, 361 bp, Homo sapiens
  misc_feature 15, 27, 92, 124, 127, 183, 198, 244, 320: n = A,T,C or G
tgcagacagtaaatnaattttatttgngttcacagaacatactaggcgatctcgacagtcgctccgtgacagcccaccaacccccaaccctntacctcgcagccaccctaaaggcgacttcaanaanatggaaggatctcacggatctcattcctaatggtccgccgaagtctcacacagtanacagacggagttganatgctggaggatgcagtcacctcctaaacttacgacccaccaccanacttcatcccagccgggacgtcctcccccacccgagtcctccccatttcttctcctactttgccgcagttccaggngtcctgcttccaccagtcccacaaagctcaataaataccaa

SEQ ID NO: 304 - DNA, 301 bp, Homo sapiens
  misc_feature 23, 104, 192: n = A,T,C or G
ctctttacaacagcctttatttncggcccttgatcctgctcggatgctggtggaggcccttagctccgcccgccaggctctgtgccgcctccccgcaggcgcanattcatgaacacggtgctcaggggcttgaggccgtactcccccagcgggagctggtcctccaggggcttcccctcgaaggtcagccanaacaggtcgtcctgcacaccctccagcccgctcacttgctgcttcaggtgggccacggtctgcgtcagccgcacctcgtaggtgctgctgcggcccttgttattcctca

SEQ ID NO: 305 - DNA, 331 bp, Homo sapiens
  misc_feature 3, 36, 60, 193, 223: n = A,T,C or G
ganaggctagtaacatcagttttattgggttggggnggcaaccatagcctggctgggggnggggctggccctcacaggttgttgagttccagcagggtctggtccaaggtctggtgaatctcgacgttctcctccttggcactggccaaggtctcttctaggtcatcgatggttttctccaactttgccacanacctctcggcaaactctgctcgggtctcancctccttcagcttctcctccaacagtttgatctcctcttcatatttatcttctttgggggaatactcctcctctgaggccatcagggacttgagggcctggtccatgg

SEQ ID NO: 306 - DNA, 457 bp, Homo sapiens
aatatgtaaaggtaataacttttattatattaaagacaatgcaaacgaaaaacagaattgagcagtgcaaaatttaaaggactgttttgttctcaaagttgcaagtttcaaagccaaaagaattatatgtatcaaatatataagtaaaaaaaagttagactttcaagcctgtaatcccagcactttgggaggctgaggcaggtggatcactaacattaaaaagacaacattagattttgtcgatttatagcaattttataaatatataactttgtcacttggatcctgaagcaaaataataaagtgaatttgggatttttgtacttggtaaaaagtttaacaccctaaattcacaactagtggatcccccgggctgcaggaattcgatatcaagcttatcgataccgtcgacctcgagggggggcccggtacccaattcgccctatagtgagtcgta

SEQ ID NO: 307 - DNA, 491 bp, Homo sapiens
gtgcttggacggaacccggcgctcgttccccaccccggccggccgcccatagccagccctccgtcacctcttcaccgcaccctcggactgccccaaggcccccgccgccgctccagcgccgcgcagccaccgccgccgccgccgcctctccttagtcgccgccatgacgaccgcgtccacctcgcaggtgcgccagaactaccaccaggactcagaggccgccatcaaccgccagatcaacctggagctctacgcctcctacgtttacctgtccatgtcttactactttgaccgcgatgatgtggctttgaagaactttgccaaatactttcttcaccaatctcatgaggagagggaacatgctgagaaactgatgaagctgcagaaccaacgaggtggccgaatcttccttcaggatatcaagaaaccagactgtgatgactgggagagcgggctgaatgcaatggagtgtgcattacatttggaaaaaa

SEQ ID NO: 308 - DNA, 421 bp, Homo sapiens
ctcagcgcttcttctttcttggtttgatcctgactgctgtcatggcgtgccctctggagaaggccctggatgtgatggtgtccaccttccacaagtactcgggcaaagagggtgacaagttcaagctcaacaagtcagaactaaaggagctgctgacccgggagctgcccagcttcttggggaaaaggacagatgaagctgctttccagaagctgatgagcaacttggacagcaacagggacaacgaggtggacttccaagagtactgtgtcttcctgtcctgcatcgccatgatgtgtaacgaattctttgaaggcttcccagataagcagcccaggaagaaatgaaaactcctctgatgtggttggggggtctgccagctggggccctccctgtcgccagtgggcacttttttttttcc

SEQ ID NO: 309 - DNA, 321 bp, Homo sapiens
accaaatggcggatgacgccggtgcagcgggggggcccgggggccctggtggccctgggatggggaaccgcggtggcttccgcggaggtttcggcagtggcatccggggccggggtcgcggccgtggacggggccggggccgaggccgcggagctcgcggaggcaaggccgaggataaggagtggatgcccgtcaccaagttgggccgcttggtcaaggacatgaagatcaagtccctggaggagatctatctcttctccctgcccattaaggaatcagagatcattgatttcttcctgggggcctctctcaaggatgagg

SEQ ID NO: 310 - DNA, 381 bp, Homo sapiens
ttaaccagccatattggctcaataaatagcttcggtaaggagttaatttccttctagaaatcagtgcctatttttcctggaaactcaattttaaatagtccaattccatctgaagccaagctgttgtcattttcattcggtgacattctctcccatgacacccagaaggggcagaagaaccacatttttcatttatagatgtttgcatcctttgtattaaaattattttgaaggggttgcctcattggatggcttttttttttttcctccagggagaaggggagaaatgtacttggaaattaatgtatgtttacatctctttgcaaattcctgtacatagagatatattttttaagtgtgaatgtaacaacatactgtgaa

SEQ ID NO: 311 - DNA, 538 bp, Homo sapiens
tttgaatttacaccaagaacttctcaataaaagaaaatcatgaatgctccacaatttcaacataccacaagagaagttaatttcttaacattgtgttctatgattatttgtaagaccttcaccaagttctgatatcttttaaagacatagttcaaaattgcttttgaaaatctgtattcttgaaaatatccttgttgtgtattaggtttttaaataccagctaaaggattacctcactgagtcatcagtaccctcctattcagctccccaagatgatgtgtttttgcttaccctaagagaggttttcttcttatttttagataattcaagtgcttagataaattatgttttctttaagtgtttatggtaaactcttttaaagaaaatttaatatgttatagctgaatctttttggtaactttaaatctttatcatagactctgtacatatgttcaaattagctgcttgcctgatgtgtgtatcatcggtgggatgacagaacaaacatatttatgatcatgaataatgtgctttgtaa

SEQ ID NO: 312 - DNA, 176 bp, Homo sapiens
ggaggagcagctgagagatagggtcagtgaatgcggttcagcctgctacctctcctgtcttcatagaaccattgccttagaattattgtatgacacgttttttgttggttaagctgtaaggttttgttctttgtgaacatgggtattttgaggggagggtggagggagtagggaag

SEQ ID NO: 313 - DNA, 396 bp, Homo sapiens
ccagcacccccaggccctgggggacctgggttctcagactgccaaagaagccttgccatctggcgctcccatggctcttgcaacatctccccttcgtttttgagggggtcatgccgggggagccaccagcccctcactgggttcggaggagagtcaggaagggccaagcacgacaaagcagaaacatcggatttggggaacgcgtgtcaatcccttgtgccgcagggctgggcgggagagactgttctgttccttgtgtaactgtgttgctgaaagactacctcgttcttgtcttgatgtgtcaccggggcaactgcctgggggcggggatgggggcagggtggaagcggctccccattttataccaaaggtgctacatctatgtgatgggtgggg

SEQ ID NO: 314 - DNA, 311 bp, Homo sapiens
cctcaacatcctcagagaggactggaagccagtccttacgataaactccataatttatggcctgcagtatctcttcttggagcccaaccccgaggacccactgaacaaggaggccgcagaggtcctgcagaacaaccggcggctgtttgagcagaacgtgcagcgctccatgcggggtggctacatcggctccacctactttgagcgctgcctgaaatagggttggcgcatacccacccccgccacggccacaagccctggcatcccctgcaaatatttattgggggccatgggtaggggtttggggggcg

SEQ ID NO: 315 - DNA, 336 bp, Homo sapiens
tttagaacatggttatcatccaagactactctaccctgcaacattgaactcccaagagcaaatccacattcctcttgagttctgcagcttctgtgtaaatagggcagctgtcgtctatgccgtagaatcacatgatctgaggaccattcatggaagctgctaaatagcctagtctggggagtcttccataaagttttgcatggagcaaacaaacaggattaaactaggtttggttccttcagccctctaaaagcatagggcttagcctgcaggcttccttgggctttctctgtgtgtgtagttttgtaaacactatagcatctgttaagatccagt

SEQ ID NO: 316 - DNA, 436 bp, Homo sapiens
aacatggtctgcgtgccttaagagagacgcttcctgcagaacaggacctgactacaaagaatgtttccattggaattgttggtaaagacttggagtttacaatctatgatgatgatgatgtgtctccattcctggaaggtcttgaagaaagaccacagagaaaggcacagcctgctcaacctgctgatgaacctgcagaaaaggctgatgaaccaatggaacattaagtgataagccagtctatatatgtattatcaaatatgtaagaatacaggcaccacatactgatgacaataatctatactttgaaccaaaagttgcagagtggtggaatgctatgttttaggaatcagtccagatgtgagttttttccaagcaacctcactgaaacctatataatggaatacatttttctttgaaagggtctgtataatca

SEQ ID NO: 317 - DNA, 196 bp, Homo sapiens
tattccttgtgaagatgatatactatttttgttaagcgtgtctgtatttatgtgtgaggagctgctggcttgcagtgcgcgtgcacgtggagagctggtgcccggagattggacggcctgatgctccctcccctgccctggtccagggaagctggccgagggtcctggctcctgaggggcatctgcccctccccca

SEQ ID NO: 318 - DNA, 381 bp, Homo sapiens
  misc_feature 8, 9, 102, 122, 167, 182, 193, 235, 253, 265, 266, 290, 321,378: n = A,T,C or G
gacgcttnngccgtaacgatgatcggagacatcctgctgttcgggacgttgctgatgaatgccggggcggtgctgaactttaagctgaaaaagaaggacacncagggctttggggaggagtncagggagcccaacacaggtgacaacatccgggaattcttgctgancctcagatactttcnaatcttcatcnccctgtggaacatcttcatgatgttctgcatgattgtgctgntcggctcttgaatcccancgatgaaaccannaactcactttcccgggatgccgantctccattcctccattcctgatgacttcaanaatgtttttgaccaaaaaaccgacaaccttcccagaaagtccaagctcgtggtgggngga

SEQ ID NO: 319 - DNA, 506 bp, Homo sapiens
ctaagctttacgaatggggtgacaacttatgataaaaactagagctagtgaattagcctatttgtaaatacctttgttataattgataggatacatcttggacatggaattgttaagccacctctgagcagtgtatgtcaggacttgttcattaggttggcagcagaggggcagaaggaattatacaggtagagatgtatgcagatgtgtccatatatgtccatatttacattttgatagccattgatgtatgcatctcttggctgtactataagaacacattaattcaatggaaatacactttgctaatattttaatggtatagatctgctaatgaattctcttaaaaacatactgtattctgttgctgtgtgtttcattttaaattgagcattaagggaatgcagcatttaaatcagaactctgccaatgcttttatctagaggcgtgttgccatttttgtcttatatgaaatttctgtcccaagaaaggcaggattacatctt

SEQ ID NO: 320 - DNA, 351 bp, Homo sapiens
ctgacctgcaggacgaaaccatgaagagcctgatccttcttgccatcctggccgccttagcggtagtaactttgtgttatgaatcacatgaaagcatggaatcttatgaacttaatcccttcattaacaggagaaatgcaaataccttcatatcccctcagcagagatggagagctaaagtccaagagaggatccgagaacgctctaagcctgtccacgagctcaatagggaagcctgtgatgactacagactttgcgaacgctacgccatggtttatggatacaatgctgcctataatcgctacttcaggaagcgccgagggaccaaatgagactgagggaagaaaaaaa

SEQ ID NO: 321 - DNA, 421 bp, Homo sapiens
ctcggaggcgttcagctgcttcaagatgaagctgaacatctccttcccagccactggctgccagaaactcattgaagtggacgatgaacgcaaacttcgtactttctatgagaagcgtatggccacagaagttgctgctgacgctctgggtgaagaatggaagggttatgtggtccgaatcagtggtgggaacgacaaacaaggtttccccatgaagcagggtgtcttgacccatggccgtgtccgcctgctactgagtaaggggcattcctgttacagaccaaggagaactggagaaagaaagagaaaatcagttcgtggttgcattgtggatgcaaatctgagcgttctcaacttggttattgtaaaaaaaggagagaaggatattcctggactgactgatactacagtgcctcgccgc

SEQ ID NO: 322 - DNA, 521 bp, Homo sapiens
agcagctctcctgccacagctcctcaccccctgaaaatgttcgcctgctccaagtttgtctccactccctccttggtcaagagcacctcacagctgctgagccgtccgctatctgcagtggtgctgaaacgaccggagatactgacagatgagagcctcagcagcttggcagtctcatgtccccttacctcacttgtctctagccgcagcttccaaaccagcgccatttcaagggacatcgacacagcagccaagttcattggagctggggctgccacagttggggtggctggttctggggctgggattggaactgtgtttgggagcctcatcattggttatgccaggaacccttctctgaagcaacagctcttctcctacgccattctgggctttgccctctcggaggccatggggctcttttgtctgatggtagcctttctcatcctctttgccatgtgaaggagccgtctccacctcccatagttctcccgcgtctggttggccccgtgtgttccttt

SEQ ID NO: 323 - DNA, 435 bp, Homo sapiens
ccgaggtcgcacgcgtgagacttctccgccgcagacgccgccgcgatgcgctacgtcgcctcctacctgctggctgccctagggggcaactcctcccccagcgccaaggacatcaagaagatcttggacagcgtgggtatcgaggcggacgacgaccggctcaacaaggttatcagtgagctgaatggaaaaaacattgaagacgtcattgcccagggtattggcaagcttgccagtgtacctgctggtggggctgtagccgtctctgctgccccaggctctgcagcccctgctgctggttctgcccctgctgcagcagaggagaagaaagatgagaagaaggaggagtctgaagagtcagatgatgacatgggatttggcctttttgattaaattcctgctcccctgcaaataaagcctttttacacatctcaa

SEQ ID NO: 324 - DNA, 521 bp, Homo sapiens
aggagatcgactttcggtgcccgcaagaccagggctggaacgccgagatcacgctgcagatggtgcagtacaagaatcgtcaggccatcctggcggtcaaatccacgcggcagaagcagcagcacctggtccagcagcagcccccctcgcagccgcagccgcagccgcagctccagccccaaccccagcctcagcctcagccgcaaccccagccccaatcacaaccccagcctcagccccaacccaagcctcagccccagcagctccacccgtatccgcatccacatccacatccacactctcatcctcactcgcacccacaccctcacccgcacccgcatccgcaccaaataccgcacccacacccacagccgcactcgcagccgcacgggcaccggcttctccgcagcacctccaactctgcctgaaaggggcagctcccgggcaagacaaggttttgaggacttgaggaagtgggacgagcacatttctattgtcttcacttggatcaaaagcaaaac

SEQ ID NO: 325 - DNA, 451 bp, Homo sapiens
attttcatttccattaacctggaagctttcatgaatattctcttcttttaaaacattttaacattatttaaacagaaaaagatgggctctttctggttagttgttacatgatagcagagatatttttacttagattactttgggaatgagagattgttgtcttgaactctggcactgtacagtgaatgtgtctgtagttgtgttagtttgcattaagcatgtataacattcaagtatgtcatccaaataagaggcatatacattgaattgtttttaatcctctgacaagttgactcttcgacccccacccccacccaagacattttaatagtaaatagagagagagagaagagttaatgaacatgaggtagtgttccactggcaggatgacttttcaatagctcaaatcaatttcagtgcctttatcacttgaattattaacttaatttga

SEQ ID NO: 326 - DNA, 421 bp, Homo sapiens
  misc_feature 296: n = A,T,C or G
cgcggtcgtaagggctgaggatttttggtccgcacgctcctgctcctgactcaccgctgttcgctctcgccgaggaacaagtcggtcaggaagcccgcgcgcaacagccatggcttttaaggataccggaaaaacacccgtggagccggaggtggcaattcaccgaattcgaatcaccctaacaagccgcaacgtaaaatccttggaaaaggtgtgtgctgacttgataagaggcgcaaaagaaaagaatctcaaagtgaaaggaccagttcgaatgcctaccaagactttgagantcactacaagaaaaactccttgtggtgaaggttctaagacgtgggatcgtttccagatgagaattcacaagcgactcattgacttgcacagtccttctgagattgttaagcagattacttccatc

SEQ ID NO: 327 - DNA, 456 bp, Homo sapiens
atcttgacgaggctgcggtgtctgctgctattctccgagcttcgcaatgccgcctaaggacgacaagaagaagaaggacgctggaaagtcggccaagaaagacaaagacccagtgaacaaatccgggggcaaggccaaaaagaagaagtggtccaaaggcaaagttcgggacaagctcaataacttagtcttgtttgacaaagctacctatgataaactctgtaaggaagttcccaactataaacttataaccccagctgtggtctctgagagactgaagattcgaggctccctggccagggcagcccttcaggagctccttagtaaaggacttatcaaactggtttcaaagcacagagctcaagtaatttacaccagaaataccaagggtggagatgctccagctgctggtgaagatgcatgaataggtccaaccagctgtacatttggaaaaat

SEQ ID NO: 328 - DNA, 471 bp, Homo sapiens
gtggaagtgacatcgtctttaaaccctgcgtggcaatccctgacgcaccgccgtgatgcccagggaagacagggcgacctggaagtccaactacttccttaagatcatccaactattggatgattatccgaaatgtttcattgtgggagcagacaatgtgggctccaagcagatgcagcagatccgcatgtcccttcgcgggaaggctgtggtgctgatgggcaagaacaccatgatgcgcaaggccatccgagggcacctggaaaacaacccagctctggagaaactgctgcctcatatccgggggaatgtgggctttgtgttcaccaaggaggacctcactgagatcagggacatgttgctggccaataaggtgccagctgctgcccgtgctggtgccattgccccatgtgaagtcactgtgccagcccagaacactggtctcgggcccgagaagacctcctttttcca

SEQ ID NO: 329 - DNA, 278 bp, Homo sapiens
  misc_feature 154, 204: n = A,T,C or G
gtttaaacttaagcttggtaccgagctcggatccactagtccagtgtggtggaattctagaaattgagatgcccccccaggccagcaaatgttcctttttgttcaaagtctatttttattccttgatatttttcttttttttttttttttttgnggatggggacttgtgaatttttctaaaggtgctatttaacatgggagganagcgtgtgcggctccagcccagcccgctgctcactttccaccctctctccacctgcctctggcttctcaggcct

SEQ ID NO: 330 - DNA, 338 bp, Homo sapiens
ctcaggcttcaacatcgaatacgccgcaggccccttcgccctattcttcatagccgaatacacaaacattattataataaacaccctcaccactacaatcttcctaggaacaacatatgacgcactctcccctgaactctacacaacatattttgtcaccaagaccctacttctaacctccctgttcttatgaattcgaacagcatacccccgattccgctacgaccaactcatacacctcctatgaaaaaacttcctaccactcaccctagcattacttatatgatatgtctccatacccattacaatctccagcattccccctcaaacctaaaaaa

SEQ ID NO: 331 - DNA, 2820 bp, Homo sapiens
tggcaaaatcctggagccagaagaaaggacagcagcattgatcaatcttacagctaacatgttgtacctggaaaacaatgcccagactcaatttagtgagccacagtacacgaacctggggctcctgaacagcatggaccagcagattcggaacggctcctcgtccaccagtccctataacacagaccacgcgcagaacagcgtcacggcgccctcgccctacgcacagcccagccccaccttcgatgctctctctccatcacccgccatcccctccaacaccgactacccaggcccgcacagttccgacgtgtccttccagcagtcgagcaccgccaagtcggccacctggacgtattccactgaactgaagaaactctactgccaaattgcaaagacatgccccatccagatcaaggtgatgaccccacctcctcagggagctgttatccgcgccatgcctgtctacaaaaaagctgagcacgtcacggaggtggtgaagcggtgccccaaccatgagctgagccgtgagttcaacgagggacagattgcccctcctagtcatttgattcgagtagaggggaacagccatgcccagtatgtagaagatcccatcacaggaagacagagtgtgctggtaccttatgagccaccccaggttggcactgaattcacgacagtcttgtacaatttcatgtgtaacagcagttgtgttggagggatgaaccgccgtccaattttaatcattgttactctggaaaccagagatgggcaagtcctgggccgacgctgctttgaggcccggatctgtgcttgcccaggaagagacaggaaggcggatgaagatagcatcagaaagcagcaagtttcggacagtacaaagaacggtgatggtacgaagcgcccgtttcgtcagaacacacatggtatccagatgacatccatcaagaaacgaagatccccagatgatgaactgttatacttaccagtgaggggccgtgagacttatgaaatgctgttgaagatcaaagagtccctggaactcatgcagtaccttcctcagcacacaattgaaacgtacaggcaacagcaacagcagcagcaccagcacttacttcagaaacagacctcaatacagtctccatcttcatatggtaacagctccccacctctgaacaaaatgaacagcatgaacaagctgccttctgtgagccagcttatcaaccctcagcagcgcaacgccctcactcctacaaccattcctgatggcatgggagccaacattcccatgatgggcacccacatgccaatggctggagacatgaatggactcagccccacccaggcactccctcccccactctccatgccatccacctcccactgcacacccccacctccgtatcccacagattgcagcattgtcagtttcttagcgaggttgggctgttcatcatgtctggactatttcacgacccaggggctgaccaccatctatcagattgagcattactccatggatgatctggcaagtctgaaaatccctgagcaatttcgacatgcgatctggaagggcatcctggaccaccggcagctccacgaattctcctccccttctcatctcctgcggaccccaagcagtgcctctacagtcagtgtgggctccagtgagacccggggtgagcgtgttattgatgctgtgcgattcaccctccgccagaccatctctttcccaccccgagatgagtggaatgacttcaactttgacatggatgctcgccgcaataagcaacagcgcatcaaagaggagggggagtgagcctcaccatgtgagctcttcctatccctctcctaactgccagccccctaaaagcactcctgcttaatcttcaaagccttctccctagctcctccccttcctcttgtctgatttcttaggggaaggagaagtaagaggctacctcttacctaacatctgacctggcatctaattctgattctggctttaagccttcaaaactatagcttgcagaactgtagctgccatggctaggtagaagtgagcaaaaaagagttgggtgtctccttaagctgcagagatttctcattgacttttataaagcatgttcacccttatagtctaagactatatatataaatgtataaatatacagtatagatttttgggtggggggcattgagtattgtttaaaatgtaatttaaatgaaagaaaattgagttgcacttattgaccattttttaatttacttgttttggatggcttgtctatactccttcccttaaggggtatcatgtatggtgataggtatctagagcttaatgctacatgtgagtgcgatgatgtacagattctttcagttctttggattctaaatacatgccacatcaaacctttgagtagatccatttccattgcttattatgtaggtaagactgtagatatgtattcttttctcagtgttggtatattttatattactgacatttcttctagtgatgatggttcacgttggggtgatttaatccagttataagaagaagttcatgtccaaacggtcctctttagtttttggttgggaatgaggaaaattcttaaaaggcccatagcagccagttcaaaaacacccgacgtcatgtatttgagcatatcagtaacccccttaaatttaatacccagataccttatcttacaatgttgattgggaaaacatttgctgcccattacagaggtattaaaactaaatttcactactagattgactaactcaaatacacatttgctactgttgtaagaattc

SEQ ID NO: 332 - DNA, 2270 bp, Homo sapiens
tcgttgatatcaaagacagttgaaggaaatgaattttgaaacttcacggtgtgccaccctacagtactgccctgacccttacatccagcgtttcgtagaaacccagctcatttctcttggaaagaaagttattaccgatccaccatgtcccagagcacacagacaaatgaattcctcagtccagaggttttccagcatatctgggattttctggaacagcctatatgttcagttcagcccattgacttgaactttgtggatgaaccatcagaagatggtgcgacaaacaagattgagattagcatggactgtatccgcatgcaggactcggacctgagtgaccccatgtggccacagtacacgaacctggggctcctgaacagcatggaccagcagattcagaacggctcctcgtccaccagtccctataacacagaccacgcgcagaacagcgtcacggcgccctcgccctacgcacagcccagctccaccttcgatgctctctctccatcacccgccatcccctccaacaccgactacccaggcccgcacagtttcgacgtgtccttccagcagtcgagcaccgccaagtcggccacctggacgtattccactgaactgaagaaactctactgccaaattgcaaagacatgccccatccagatcaaggtgatgaccccacctcctcagggagctgttatccgcgccatgcctgtctacaaaaaagctgagcacgtcacggaggtggtgaagcggtgccccaaccatgagctgagccgtgaattcaacgagggacagattgcccctcctagtcatttgattcgagtagaggggaacagccatgcccagtatgtagaagatcccatcacaggaagacagagtgtgctggtaccttatgagccaccccaggttggcactgaattcacgacagtcttgtacaatttcatgtgtaacagcagttgtgttggagggatgaaccgccgtccaattttaatcattgttactctggaaaccagagatgggcaagtcctgggccgacgctgctttgaggcccggatctgtgcttgcccaggaagagacaggaaggcggatgaagatagcatcagaaagcagcaagtttcggacagtacaaagaacggtgatggtacgaagcgcccgtttcgtcagaacacacatggtatccagatgacatccatcaagaaacgaagatccccagatgatgaactgttatacttaccagtgaggggccgtgagacttatgaaatgctgttgaagatcaaagagtccctggaactcatgcagtaccttcctcagcacacaattgaaacgtacaggcaacagcaacagcagcagcaccagcacttacttcagaaacagacctcaatacagtctccatcttcatatggtaacagctccccacctctgaacaaaatgaacagcatgaacaagctgccttctgtgagccagcttatcaaccctcagcagcgcaacgccctcactcctacaaccattcctgatggcatgggagccaacattcccatgatgggcacccacatgccaatggctggagacatgaatggactcagccccacccaggcactccctcccccactctccatgccatccacctcccactgcacacccccacctccgtatccaacagattgcagcattgtcggtttcttagcgaggttgggctgttcatcatgtctggactatttcacgacccaggggctgaccaccatctatcagattgagcattactccatggatgatctggcaagtctgaaaatccctgagcaatttcgacatgcgatctggaagggcatcctggaccaccggcagctccacgaattctcctccccttctcatctcctgcggaccccaagcagtgcctctacagtcagtgtgggctccagtgagacccggggtgagcgtgttattgatgctgtgcgattcaccctccgccagaccatctctttcccaccccgagatgagtggaatgacttcaactttgacatggatgctcgccgcaataagcaacagcgcatcaaagaggagggggagtgagcctcaccatgtgagctcttcctatccctctcctaactgccagccccctaaaagcactcctgcttaatcttcaaagccttctccctagctcctccccttcctcttgtctgatttcttaggggaaggagaagtaagaggctacctcttacctaacatctgacctggcatctaattctgattctggctttaagccttcaaaa

SEQ ID NO: 333 - DNA, 2816 bp, Homo sapiens
tcgttgatatcaaagacagttgaaggaaatgaattttgaaacttcacggtgtgccaccctacagtactgccctgacccttacatccagcgtttcgtagaaacccagctcatttctcttggaaagaaagttattaccgatccaccatgtcccagagcacacagacaaatgaattcctcagtccagaggttttccagcatatctgggattttctggaacagcctatatgttcagttcagcccattgacttgaactttgtggatgaaccatcagaagatggtgcgacaaacaagattgagattagcatggactgtatccgcatgcaggactcggacctgagtgaccccatgtggccacagtacacgaacctggggctcctgaacagcatggaccagcagattcagaacggctcctcgtccaccagtccctataacacagaccacgcgcagaacagcgtcacggcgccctcgccctacgcacagcccagctccaccttcgatgctctctctccatcacccgccatcccctccaacaccgactacccaggcccgcacagtttcgacgtgtccttccagcagtcgagcaccgccaagtcggccacctggacgtattccactgaactgaagaaactctactgccaaattgcaaagacatgccccatccagatcaaggtgatgaccccacctcctcagggagctgttatccgcgccatgcctgtctacaaaaaagctgagcacgtcacggaggtggtgaagcggtgccccaaccatgagctgagccgtgaattcaacgagggacagattgcccctcctagtcatttgattcgagtagaggggaacagccatgcccagtatgtagaagatcccatcacaggaagacagagtgtgctggtaccttatgagccaccccaggttggcactgaattcacgacagtcttgtacaatttcatgtgtaacagcagttgtgttggagggatgaaccgccgtccaattttaatcattgttactctggaaaccagagatgggcaagtcctgggccgacgctgctttgaggcccggatctgtgcttgcccaggaagagacaggaaggcggatgaagatagcatcagaaagcagcaagtttcggacagtacaaagaacggtgatggtacgaagcgcccgtttcgtcagaacacacatggtatccagatgacatccatcaagaaacgaagatccccagatgatgaactgttatacttaccagtgaggggccgtgagacttatgaaatgctgttgaagatcaaagagtccctggaactcatgcagtaccttcctcagcacacaattgaaacgtacaggcaacagcaacagcagcagcaccagcacttacttcagaaacatctcctttcagcctgcttcaggaatgagcttgtggagccccggagagaaactccaaaacaatctgacgtcttctttagacattccaagcccccaaaccgatcagtgtacccatagagccctatctctatattttaagtgtgtgtgttgtatttccatgtgtatatgtgagtgtgtgtgtgtgtatgtgtgtgcgtgtgtatctagccctcataaacaggacttgaagacactttggctcagagacccaactgctcaaaggcacaaagccactagtgagagaatcttttgaagggactcaaacctttacaagaaaggatgttttctgcagattttgtatccttagaccggccattggtgggtgaggaaccactgtgtttgtctgtgagctttctgttgtttcctgggagggaggggtcaggtggggaaaggggcattaagatgtttattggaacccttttctgtcttcttctgttgtttttctaaaattcacagggaagcttttgagcaggtctcaaacttaagatgtctttttaagaaaaggagaaaaaagttgttattgtctgtgcataagtaagttgtaggtgactgagagactcagtcagacccttttaatgctggtcatgtaataatattgcaagtagtaagaaacgaaggtgtcaagtgtactgctgggcagcgaggtgatcattaccaaaagtaatcaactttgtgggtggagagttctttgtgagaacttgcattatttgtgtcctcccctcatgtgtaggtagaacatttcttaatgctgtgtacctgcctctgccactgtatgttggcatctgttatgctaaagtttttcttgtacatgaaaccctggaagacctactacaaaaaaactgttgtttggcccccatagcaggtgaactcattttgtgcttttaatagaaagacaaatccaccccagtaatattgcccttacgtagttgtttaccattattcaaagctcaaaatagaatttgaagccctctcacaaaatctgtgattaatttgcttaattagagcttctatccctcaagcctacctaccataaaaccagccatattactgatactgttcagtgcatttagccaggagacttacgttttgagtaagtgagatccaagcagacgtgttaaaatcagcactcctggactggaaattaaagattgaaagggtagactacttttcttttttttactcaaaagtttagagaatctctgtttctttccattttaaaaacatattttaagataatagcataaagactttaaaaatgttcctcccctccatcttcccacacccagtcaccagcactgtattttctgtcaccaagacaatgatttcttgttattgaggctgttgcttttgtggatgtgtgattttaattttcaataaacttttgcatcttggtttaaaagaaa

SEQ ID NO: 334 - DNA, 2082 bp, Homo sapiens
agatgctacagcgactgcacacccaggctgtatgatacagcctattgctcccgggctgcaaacctgtccagcatgtgatgtggtgggatactgaattgaataccgaatactgtaggcaattgtaacacagtggtaagtctttgtgtatctaaacatagctaaacaccaaaaggtatagtaagaatatggtattataatcttatggaactatcattgtatatgtggtttgtcaaccagaatgtagttatacagcacaggactgtgcttatgatgtgccaagcacagctctcagtactaactcctttaatcttcatatcaaccctaggaggtaacttcttaagtagattcatattgtaagggtctcggggtgggggggttggcaaaatcctggagccagaagaaaggacagcagcattgatcaatcttacagctaacatgttgtacctggaaaacaatgcccagactcaatttagtgagccacagtacacgaacctggggctcctgaacagcatggaccagcagattcagaacggctcctcgtccaccagtccctataacacagaccacgcgcagaacagcgtcacggcgccctcgccctacgcacagcccagctccaccttcgatgctctctctccatcacccgccatcccctccaacaccgactacccaggcccgcacagtttcgacgtgtccttccagcagtcgagcaccgccaagtcggccacctggacgtattccactgaactgaagaaactctactgccaaattgcaaagacatgccccatccagatcaaggtgatgaccccacctcctcagggagctgttatccgcgccatgcctgtctacaaaaaagctgagcacgtcacggaggtggtgaagcggtgccccaaccatgagctgagccgtgaattcaacgagggacagattgcccctcctagtcatttgattcgagtagaggggaacagccatgcccagtatgtagaagatcccatcacaggaagacagagtgtgctggtaccttatgagccaccccaggttggcactgaattcacgacagtcttgtacaatttcatgtgtaacagcagttgtgttggagggatgaaccgccgtccaattttaatcattgttactctggaaaccagagatgggcaagtcctgggccgacgctgctttgaggcccggatctgtgcttgcccaggaagagacaggaaggcggatgaagatagcatcagaaagcagcaagtttcggacagtacaaagaacggtgatggtacgaagcgcccgtctcgtcagaacacacatggtatccagatgacatccatcaagaaacgaagatccccagatgatgaactgttatacttaccagtgaggggccgtgagacttatgaaatgctgttgaagatcaaagagtccctggaactcatgcagtaccttcctcagcacacaattgaaacgtacaggcaacagcaacagcagcagcaccagcacttacttcagaaacagtgagtgtatcaacgtgtcattttaggaggcatgagtgacggtgactttatttggatcagcaatagggtgattgatgagcaatgtggaacataatgggagatagcagattgtcatagattcagatgacctggtatggcaaccctctttcagttgcaaccttttttacgtgtcttattataaccttcccttcagaattccacttatgttctgaaattaaatacaaaccatttctggtgaattacaaagaaactcacactaacagttctcttctctatatgcctggtccatacacactaacagtaagtacacactctatttggtagtgatgtgtatatttgaaaacatgaaatcttttctcatcccaatggattgtcttataaatctcctgggatgcacactatccacttttgggaataacactgtagaccagggatagcaaataggctttactataatataaagtgacttgtttgaatgctgtaatgagaagaattctgagacctagtgcatgataattggggaaatatctgggtgcagaaggataaggtagcatcatgttgccgtattttagcatctctg

SEQ ID NO: 335 - DNA, 4849 bp, Homo sapiens
cgttgatatcaaagacagttgaaggaaatgaattttgaaacttcacggtgtgccaccctacagtactgccctgacccttacatccagcgtttcgtagaaaccccagctcatttctcttggaaagaaagttattaccgatccaccatgtcccagagcacacagacaaatgaattcctcagtccagaggttttccagcatatctgggattttctggaacagcctatatgttcagttcagcccattgacttgaactttgtggatgaaccatcagaagatggtgcgacaaacaagattgagattagcatggactgtatccgcatgcaggactcggacctgagtgaccccatgtggccacagtacacgaacctggggctcctgaacagcatggaccagcagattcagaacggctcctcgtccaccagtccctataacacagaccacgcgcagaacagcgtcacggcgccctcgccctacgcacagcccagctccaccttcgatgctctctctccatcacccgccatcccctccaacaccgactacccaggcccgcacagtttcgacgtgtccttccagcagtcgagcaccgccaagtcggccacctggacgtattccactgaactgaagaaactctactgccaaattgcaaagacatgccccatccagatcaaggtgatgaccccacctcctcagggagctgttatccgcgccatgcctgtctacaaaaaagctgagcacgtcacggaggtggtgaagcggtgccccaaccatgagctgagccgtgaattcaacgagggacagattgcccctcctagtcatttgattcgagtagaggggaacagccatgcccagtatgtagaagatcccatcacaggaagacagagtgtgctggtaccttatgagccaccccaggttggcactgaattcacgacagtcttgtacaatttcatgtgtaacagcagttgtgttggagggatgaaccgccgtccaattttaatcattgttactctggaaaccagagatgggcaagtcctgggccgacgctgctttgaggcccggatctgtgcttgcccaggaagagacaggaaggcggatgaagatagcatcagaaagcagcaagtttcggacagtacaaagaacggtgatggtacgaagcgcccgtttcgtcagaacacacatggtatccagatgacatccatcaagaaacgaagatccccagatgatgaactgttatacttaccagtgaggggccgtgagacttatgaaatgctgttgaagatcaaagagtccctggaactcatgcagtaccttcctcagcacacaattgaaacgtacaggcaacagcaacagcagcagcaccagcacttacttcagaaacagacctcaatacagtctccatcttcatatggtaacagctccccacctctgaacaaaatgaacagcatgaacaagctgccttctgtgagccagcttatcaaccctcagcagcgcaacgccctcactcctacaaccattcctgatggcatgggagccaacattcccatgatgggcacccacatgccaatggctggagacatgaatggactcagccccacccaggcactccctcccccactctccatgccatccacctcccagtgcacacccccacctccgtatcccacagattgcagcattgtcagtttcttagcgaggttgggctgttcatcatgtctggactatttcacgacccaggggctgaccaccatctatcagattgagcattactccatggatgatctggcaagtctgaaaatccctgagcaatttcgacatgcgatctggaagggcatcctggaccaccggcagctccacgaattctcctccccttctcatctcctgcggaccccaagcagtgcctctacagtcagtgtgggctccagtgagacccggggtgagcgtgttattgatgctgtgcgattcaccctccgccagaccatctctttcccaccccgagatgagtggaatgacttcaactttgacatggatgctcgccgcaataagcaacagcgcatcaaagaggagggggagtgagcctcaccatgtgagctcttcctatccctctcctaactgccagcyccctaaaagcactcctgcttaatcttcaaagccttctccctagctcctccccttcctcttgtctgatttcttaggggaaggagaagtaagaggctacctcttacctaacatctgacctggcatctaattctgattctggctttaagccttcaaaactatagcttgcagaactgtagctgccatggctaggtagaagtgagcaaaaaagagttgggtgtctccttaagctgcagagatttctcattgacttttataaagcatgttcacccttatagtctaagactatatatataaatgtataaatatacagtatagatttttgggtggggggcattgagtattgtttaaaatgtaatttaaatgaaagaaaattgagttgcacttattgaccattttttaatttacttgttttggatggcttgtctatactccttcccttaaggggtatcatgtatggtgataggtatctagagcttaatgctacatgtgagtgacgatgatgtacagattctttcagttctttggattctaaatacatgccacatcaaacctttgagtagatccatttccattgcttattatgtaggtaagactgtagatatgtattcttttctcagtgttggtatattttatattactgacatttcttctagtgatgatggttcacgttggggtgatttaatccagttataagaagaagttcatgtccaaacgtcctctttagtttttggttgggaatgaggaaaattcttaaaaggcccatagcagccagttcaaaaacacccgacgtcatgtatttgagcatatcagtaacccccttaaatttaataccagataccttatcttacaatattgattgggaaaacatttgctgccattacagaggtattaaaactaaatttcactactagattgactaactcaaatacacatttgctactgttgtaagaattctgattgatttgattgggatgaatgccatctatctagttctaacagtgaagttttactgtctattaatattcagggtaaataggaatcattcagaaatgttgagtctgtactaaacagtaagatatctcaatgaaccataaattcaactttgtaaaaatcttttgaagcatagataatattgtttggtaaatgtttcttttgtttggtaaatgtttcttttaaagaccctcctattctataaaactctgcatgtagaggcttgtttacctttctctctctaaggtttacaataggagtggtgatttgaaaaatataaaattatgagattggttttcctgtggcataaattgcatcactgtatcattttcttttttaaccggtaagagtttcagtttgttggaaagtaactgtgagaacccagtttcccgtccatctcccttagggactacccatagacatgaaaggtccccacagagcaagagataagtctttcatggctgctgttgcttaaaccacttaaacgaagagttcccttgaaactttgggaaaacatgttaatgacaatattccagatctttcagaaatataacacatttttttgcatgcatgcaaatgagctctgaaatcttcccatgcattctggtcaagggctgtcattgcacataagcttccattttaattttaaagtgcaaaagggccagcgtggctctaaaaggtaatgtgtggattgcctctgaaaagtgtgtatatattttgtgtgaaattgcatactttgtattttgattattttttttttcttcttgggatagtgggatttccagaaccacacttgaaacctttttttatcgtttttgtattttcatgaaaataccatttagtaagaataccacatcaaataagaaataatgctacaattttaagaggggagggaagggaaagtttttttttattatttttttaaaattttgtatgttaaagagaatgagtccttgatttcaaagttttgttgtacttaaatggtaataagcactgtaaacttctgcaacaagcatgcagctttgcaaacccattaaggggaagaatgaaagctgttccttggtcctagtaagaagacaaactgcttcccttactttgctgagggtttgaataaacctaggacttccgagctatgtcagtactattcaggtaacactagggccttggaaattcctgtactgtgtctcatggatttggcactagccaaagcgaggcacccttactggcttacctcctcatggcagcctactctccttgagtgtatgagtagccagggtaaggggtaaaaggatagtaagcatagaaaccactagaaagtgggcttaatggagttcttgtggcctcagctcaatgcagttagctgaagaattgaaaagtttttgtttggagacgtttataaacagaaatggaaagcagagttttcattaaatccttttaccttttttttttcttggtaatcccctaaaataacagtatgtgggatattgaatgttaaagggatattttttttctattatttttataattgtacaaaattaagcaaatgttaaaagttttatatgctttattaatgttttcaaaaggtattatacatgtgatacattttttaagcttcagttgcttgtcttctggtactttctgttatgggcttttggggagccagaagccaatctacaatctctttttgtttgccaggacatgcaataaaatttaaaaaataaataaaaactaattaagaaataaa

SEQ ID NO: 336 - DNA, 1386 bp, Homo sapiens
atgttgtacctggaaaacaatgcccagactcaatttagtgagccacagtacacgaacctggggctcctgaacagcatggaccagcagattcagaacggctcctcgtccaccagtccctataacacagaccacgcgcagaacagcgtcacggcgccctcgccctacgcacagcccagctccaccttcgatgctctctctccatcacccgccatcccctccaacaccgactacccaggcccgcacagtttcgacgtgtccttccagcagtcgagcaccgccaagtcggccacctggacgtattccactgaactgaagaaactctactgccaaattgcaaagacatgccccatccagatcaaggtgatgaccccacctcctcagggagctgttatccgcgccatgcctgtctacaaaaaagctgagcacgtcacggaggtggtgaagcggtgccccaaccatgagctgagccgtgaattcaacgagggacagattgcccctcctagtcatttgattcgagtagaggggaacagccatgcccagtatgtagaagatcccatcacaggaagacagagtgtgctggtaccttatgagccaccccaggttggcactgaattcacgacagtcttgtacaatttcatgtgtaacagcagttgtgttggagggatgaaccgccgtccaattttaatcattgttactctggaaaccagagatgggcaagtcctgggccgacgctgctttgaggcccggatctgtgcttgcccaggaagagacaggaaggcggatgaagatagcatcagaaagcagcaagtttcggacagtacaaagaacggtgatggtacgaagcgcccgtttcgtcagaacacacatggtatccagatgacatccatcaagaaacgaagatccccagatgatgaactgttatacttaccagtgaggggccgtgagacttatgaaatgctgttgaagatcaaagagtccctggaactcatgcagtaccttcctcagcacacaattgaaacgtacaggcaacagcaacagcagcagcaccagcacttacttcagaaacagacctcaatacagtctccatcttcatatggtaacagctccccacctctgaacaaaatgaacagcatgaacaagctgccttctgtgagccagcttatcaaccctcagcagcgcaacgccctcactcctacaaccattcctgatggcatgggagccaacattcccatgatgggcacccacatgccaatggctggagacatgaatggactcagccccacccaggcactccctcccccactctccatgccatccacctcccactgcacacccccacctccgtatcccacagattgcagcattgtcaggatctggcaagtctga

SEQ ID NO: 337 - DNA, 1551 bp, Homo sapiens
atgtcccagagcacacagacaaatgaattcctcagtccagaggttttccagcatatctgggattttctggaacagcctatatgttcagttcagcccattgacttgaactttgtggatgaaccatcagaagatggtgcgacaaacaagattgagattagcatggactgtatccgcatgcaggactcggacctgagtgaccccatgtggccacagtacacgaacctggggctcctgaacagcatggaccagcagattcagaacggctcctcgtccaccagtccctataacacagaccacgcgcagaacagcgtcacggcgccctcgccctacgcacagcccagctccaccttcgatgctctctctccatcacccgccatcccctccaacaccgactacccaggcccgcacagtttcgacgtgtccttccagcagtcgagcaccgccaagtcggccacctggacgtattccactgaactgaagaaactctactgccaaattgcaaagacatgccccatccagatcaaggtgatgaccccacctcctcagggagctgttatccgcgccatgcctgtctacaaaaaagctgagcacgtcacggaggtggtgaagcggtgccccaaccatgagctgagccgtgaattcaacgagggacagattgcccctcctagtcatttgattcgagtagaggggaacagccatgcccagtatgtagaagatcccatcacaggaagacagagtgtgctggtaccttatgagccaccccaggttggcactgaattcacgacagtcttgtacaatttcatgtgtaacagcagttgtgttggagggatgaaccgccgtccaattttaatcattgttactctggaaaccagagatgggcaagtcctgggccgacgctgctttgaggcccggatctgtgcttgcccaggaagagacaggaaggcggatgaagatagcatcagaaagcagcaagtttcggacagtacaaagaacggtgatggtacgaagcgcccgtttcgtcagaacacacatggtatccagatgacatccatcaagaaacgaagatccccagatgatgaactgttatacttaccagtgaggggccgtgagacttatgaaatgctgttgaagatcaaagagtccctggaactcatgcagtaccttcctcagcacacaattgaaacgtacaggcaacagcaacagcagcagcaccagcacttacttcagaaacagacctcaatacagtctccatcttcatatggtaacagctccccacctctgaacaaaatgaacagcatgaacaagctgccttctgtgagccagcttatcaaccctcagcagcgcaacgccctcactcctacaaccattcctgatggcatgggagccaacattcccatgatgggcacccacatgccaatggctggagacatgaatggactcagccccacccaggcactccctcccccactctccatgccatccacctcccactgcacacccccacctccgtatcccacagattgcagcattgtcaggatctggcaagtctga

SEQ ID NO: 338 - protein, 586 aa, Homo sapiens [sequence omitted]

SEQ ID NO: 339 - protein, 641 aa, Homo sapiens [sequence omitted]

SEQ ID NO: 340 - protein, 448 aa, Homo sapiens
MSQSTQTNEFLSPEVFQHIWDFLEQPICSVQPIDLNFVDEPSEDGATNKIEISMDCIRMQDSDLSDPMWPQYTNLGLLNSMDQQIQNGSSSTSPYNTDHAQNSVTAPSPYAQPSSTFDALSPSPAIPSNTDYPGPHSFDVSFQQSSTAKSATWTYSTELKKLYCQIAKTCPIQIKVMTPPPQGAVIRAMPVYKKAEHVTEVVKRCPNHELSREFNEGQIAPPSHLIRVEGNSHAQYVEDPITGRQSVLVPYEPPQVGTEFTTVLYNFMCNSSCVGGMNRRPILIIVTLETRDGQVLGRRCFEARICACPGRDRKADEDSIRKQQVSDSTKNGDGTKRPFRQNTHGIQMTSIKKRRSPDDELLYLPVRGRETYEMLLKIKESLELMQYLPQHTIETYRQQQQQQHQHLLQKHLLSACFRNELVEPRRETPKQSDVFFRHSKPPNRSVYP

SEQ ID NO: 341 - protein, 356 aa, Homo sapiens [sequence omitted]

SEQ ID NO: 342 - protein, 680 aa, Homo sapiens
MNFETSRCATLQYCPDPYIQRFVETPAHFSWKESYYRSTMSQSTQTNEFLSPEVFQHIWDFLEQPICSVQPIDLNFVDEPSEDGATNKIEISMDCIRMQDSDLSDPMWPQYTNLGLLNSMDQQIQNGSSSTSPYNTDHAQNSVTAPSPYAQPSSTFDALSPSPAIPSNTDYPGPHSFDVSFQQSSTAKSATWTYSTELKKLYCQIAKTCPIQIKVMTPPPQGAVIRAMPVYKKAEHVTEVVKRCPNHELSREFNEGQIAPPSHLIRVEGNSHAQYVEDPITGRQSVLVPYEPPQVGTEFTTVLYNFMCNSSCVGGMNRRPILIIVTLETRDGQVLGRRCFEARICACPGRDRKADEDSIRKQQVSDSTKNGDGTKRPFRQNTHGIQMTSIKKRRSPDDELLYLPVRGRETYEMLLKIKESLELMQYLPQHTIETYRQQQQQQHQHLLQKQTSIQSPSSYGNSSPPLNKMNSMNKLPSVSQLINPQQRNALTPTTIPDGMGANIPMMGTHMPMAGDMNGLSPTQALPPPLSMPSTSQCTPPPPYPTDCSIVSFLARLGCSSCLDYFTTQGLTTIYQIEHYSMDDLASLKIPEQFRHAIWKGILDHRQLHEFSSPSHLLRTPSSASTVSVGSSETRGERVIDAVRFTLRQTISFPPRDEWNDFNFDMDARRNKQQRIKEEGE

SEQ ID NO: 343 - protein, 461 aa, Homo sapiens
MLYLENNAQTQFSEPQYTNLGLLNSMDQQIQNGSSSTSPYNTDHAQNSVTAPSPYAQPSSTFDALSPSPAIPSNTDYPGPHSFDVSFQQSSTAKSATWTYSTELKKLYCQIAKTCPIQIKVMTPPPQGAVIRAMPVYKKAEHVTEVVKRCPNHELSREFNEGQIAPPSHLIRVEGNSHAQYVEDPITGRQSVLVPYEPPQVGTEFTTVLYNFMCNSSCVGGMNRRPILIIVTLETRDGQVLGRRCFEARICACPGRDRKADEDSIRKQQVSDSTKNGDGTKRPFRQNTHGIQMTSIKKRRSPDDELLYLPVRGRETYEMLLKIKESLELMQYLPQHTIETYRQQQQQQHQHLLQKQTSIQSPSSYGNSSPPLNKMNSMNKLPSVSQLINPQQRNALTPTTIPDGMGANIPMMGTHMPMAGDMNGLSPTQALPPPLSMPSTSHCTPPPPYPTDCSIVRIWQV

SEQ ID NO: 344 - protein, 516 aa, Homo sapiens
MSQSTQTNEFLSPEVFQHIWDFLEQPICSVQPIDLNFVDEPSEDGATNKIEISMDCIRMQDSDLSDPMWPQYTNLGLLNSMDQQIQNGSSSTSPYNTDHAQNSVTAPSPYAQPSSTFDALSPSPAIPSNTDYPGPHSFDVSFQQSSTAKSATWTYSTELKKLYCQIAKTCPIQIKVMTPPPQGAVIRAMPVYKKAEHVTEVVKRCPNHELSREFNEGQIAPPSHLIRVEGNSHAQYVEDPITGRQSVLVPYEPPQVGTEFTTVLYNFMCNSSCVGGMNRRPILIIVTLETRDGQVLGRRCFEARICACPGRDRKADEDSIRKQQVSDSTKNGDGTKRPFRQNTHGIQMTSIKKRRSPDDELLYLPVRGRETYEMLLKIKESLELMQYLPQHTIETYRQQQQQQHQHLLQKQTSIQSPSSYGNSSPPLNKMNSMNKLPSVSQLINPQQRNALTPTTIPDGMGANIPMMGTHMPMAGDMNGLSPTQALPPPLSMPSTSHCTPPPPYPTDCSIVRIWQV

SEQ ID NO: 345 - DNA, 1800 bp, Homo sapiens
gcgcctcattgccactgcagtgactaaagctgggaagacgctggtcagttcacctgccccactggttgttttttaaacaaattctgatacaggcgacatcctcactgaccgagcaaagattgacattcgtatcatcactgtgcaccattggcttctaggcactccagtggggtaggagaaggaggtctgaaaccctcgcagagggatcttgccctcattctttgggtctgaaacactggcagtcgttggaaacaggactcagggataaaccagcgcaatggattgggggacgctgcacactttcatcgggggtgtcaacaaacactccaccagcatcgggaaggtgtggatcacagtcatctttattttccgagtcatgatcctagtggtggctgcccaggaagtgtggggtgacgagcaagaggacttcgtctgcaacacactgcaaccgggatgcaaaaatgtgtgctatgaccactttttcccggtgtcccacatccggctgtgggccctccagctgatcttcgtctccaccccagcgctgctggtggccatgcatgtggcctactacaggcacgaaaccactcgcaagttcaggcgaggagagaagaggaatgatttcaaagacatagaggacattaaaaagcacaaggttcggatagaggggtcgctgtggtggacgtacaccagcagcatctttttccgaatcatctttgaagcagcctttatgtatgtgttttacttcctttacaatgggtaccacctgccctgggtgttgaaatgtgggattgacccctgccccaaccttgttgactgctttatttctaggccaacagagaagaccgtgtttaccatttttatgatttctgcgtctgtgatttgcatgctgcttaacgtggcagagttgtgctacctgctgctgaaagtgtgttttaggagatcaaagagagcacagacgcaaaaaaatcaccccaatcatgccctaaaggagagtaagcagaatgaaatgaatgagctgatttcagatagtggtcaaaatgcaatcacaggtttcccaagctaaacatttcaaggtaaaatgtagctgcgtcataaggagacttctgtcttctccagaaggcaataccaacctgaaagttccttctgtagcctgaagagtttgtaaatgactttcataataaatagacacttgagttaactttttgtaggatacttgctccattcatacacaacgtaatcaaatatgtggtccatctctgaaaacaagagactgcttgacaaaggagcattgcagtcactttgacaggttccttttaagtggactctctgacaaagtgggtactttctgaaaatttatataactgttgttgataaggaacatttatccaggaattgatacgtttattaggaaaagatatttttataggcttggatgtttttagttccgactttgaatttatataaagtatttttataatgactggtcttccttacctggaaaaacatgcgatgttagttttagaattacaccacaagtatctaaatttccaacttacaaagggtcctatcttgtaaatattgttttgcattgtctgttggcaaatttgtgaactgtcatgatacgcttaaggtgggaaagtgttcattgcacaatatatttttactgctttctgaatgtagacggaacagtgtggaagcagaaggcttttttaactcatccgtttggccgatcgttgcagaccactgggagatgtggatgtggttgcctccttttgctcgtccccgtggcttaacccttct

SEQ ID NO: 346 - protein, 261 aa, Homo sapiens
MDWGTLHTFIGGVNKHSTSIGKVWITVIFIFRVMILVVAAQEVWGDEQEDFVCNTLQPGCKNVCYDHFFPVSHIRLWALQLIFVSTPALLVAMHVAYYRHETTRKFRRGEKRNDFKDIEDIKKHKVRIEGSLWWTYTSSIFFRIIFEAAFMYVFYFLYNGYHLPWVLKCGIDPCPNLVDCFISRPTEKTVFTIFMISASVICMLLNVAELCYLLLKVCFRRSKRAQTQKNHPNHALKESKQNEMNELISDSGQNAITGFPS

SEQ ID NO: 347 - DNA, 1740 bp, Homo sapiens
atgaacaaactgtatatcggaaacctcagcgagaacgccgccccctcggacctagaaagtatcttcaaggacgccaagatcccggtgtcgggacccttcctggtgaagactggctacgcgttcgtggactgcccggacgagagctgggccctcaaggccatcgaggcgctttcaggtaaaatagaactgcacgggaaacccatagaagttgagcactcggtcccaaaaaggcaaaggattcggaaacttcagatacgaaatatcccgcctcatttacagtgggaggtgctggatagtttactagtccagtatggagtggtggagagctgtgagcaagtgaacactgactcggaaactgcagttgtaaatgtaacctattccagtaaggaccaagctagacaagcactagacaaactgaatggatttcagttagagaatttcaccttgaaagtagcctatatccctgatgaaacggccgcccagcaaaaccccttgcagcagccccgaggtcgccgggggcttgggcagaggggctcctcaaggcaggggtctccaggatccgtatccaagcagaaaccatgtgatttgcctctgcgcctgctggttcccacccaatttgttggagccatcataggaaaagaaggtgccaccattcggaacatcaccaaacagacccagtctaaaatcgatgtccaccgtaaagaaaatgcgggggctgctgagaagtcgattactatcctctctactcctgaaggcacctctgcggcttgtaagtctattctggagattatgcataaggaagctcaagatataaaattcacagaagagatccccttgaagattttagctcataataactttgttggacgtcttattggtaaagaaggaagaaatcttaaaaaaattgagcaagacacagacactaaaatcacgatatctccattgcaggaattgacgctgtataatccagaacgcactattacagttaaaggcaatgttgagacatgtgccaaagctgaggaggagatcatgaagaaaatcagggagtcttatgaaaatgatattgcttctatgaatcttcaagcacatttaattcctggattaaatctgaacgccttgggtctgttcccacccacttcagggatgccacctcccacctcagggcccccttcagccatgactcctccctacccgcagtttgagcaatcagaaacggagactgttcatctgtttatcccagctctatcagtcggtgccatcatcggcaagcagggccagcacatcaagcagctttctcgctttgctggagcttcaattaagattgctccagcggaagcaccagatgctaaagtgaggatggtgattatcactggaccaccagaggctcagttcaaggctcagggaagaatttatggaaaaattaaagaagaaaactttgttagtcctaaagaagaggtgaaacttgaagctcatatcagagtgccatcctttgctgctggcagagttattggaaaaggaggcaaaacggtgaatgaacttcagaatttgtcaagtgcagaagttgttgtccctcgtgaccagacacctgatgagaatgaccaagtggttgtcaaaataactggtcacttctatgcttgccaggttgcccagagaaaaattcaggaaattctgactcaggtaaagcagcaccaacaacagaaggctctgcaaagtggaccacctcagtcaagacggaagtaa

SEQ ID NO: 348 - protein, 579 aa, Homo sapiens
MNKLYIGNLSENAAPSDLESIFKDAKIPVSGPFLVKTGYAFVDCPDESWALKAIEALSGKIELHGKPIEVEHSVPKRQRIRKLQIRNIPPHLQWEVLDSLLVQYGVVESCEQVNTDSETAVVNVTYSSKDQARQALDKLNGFQLENFTLKVAYIPDETAAQQNPLQQPRGRRGLGQRGSSRQGSPGSVSKQKPCDLPLRLLVPTQFVGAIIGKEGATIRNITKQTQSKIDVHRKENAGAAEKSITILSTPEGTSAACKSILEIMHKEAQDIKFTEEIPLKILAHNNFVGRLIGKEGRNLKKIEQDTDTKITISPLQELTLYNPERTITVKGNVETCAKAEEEIMKKIRESYENDIASMNLQAHLIPGLNLNALGLFPPTSGMPPPTSGPPSAMTPPYPQFEQSETETVHLFIPALSVGAIIGKQGQHIKQLSRFAGASIKIAPAEAPDAKVRMVIITGPPEAQFKAQGRIYGKIKEENFVSPKEEVKLEAHIRVPSFAAGRVIGKGGKTVNELQNLSSAEVVVPRDQTPDENDQVVVKITGHFYACQVAQRKIQEILTQVKQHQQQKALQSGPPQSRRK

SEQ ID NO: 349 - DNA, 207 bp, Homo sapiens
atgtggcagcccctcttcttcaagtggctcttgtcctgttgccctgggagttctcaaattgctgcagcagcctccacccagcctgaggatgacatcaatacacagaggaagaagagtcaggaaaagatgagagaagttacagactctcctgggcgaccccgagagcttaccattcctcagacttcttcacatggtgctaacagattt

SEQ ID NO: 350 - protein, 69 aa, Homo sapiens
MWQPLFFKWLLSCCPGSSQIAAAASTQPEDDINTQRKKSQEKMREVTDSPGRPRELTIPQTSSHGANRF

SEQ ID NO: 351 - DNA, 1012 bp, Homo sapiens
ccctctagaaataattttgtttaactttaagaaggagatatacatatgcatcaccatcaccatcacacggccgcgtccgataacttccagctgtcccagggtgggcagggattcgccattccgatcgggcaggcgatggcgatcgcgggccagatcaagcttcccaccgttcatatcgggcctaccgccttcctcggcttgggtgttgtcgacaacaacggcaacggcgcacgagtccaacgcgtggtcgggagcgctccggcggcaagtctcggcatctccaccggcgacgtgatcaccgcggtcgacggcgctccgatcaactcggccaccgcgatggcggacgcgcttaacgggcatcatcccggtgacgtcatctcggtgacctggcaaaccaagtcgggcggcacgcgtacagggaacgtgacattggccgagggacccccggccgaattcatggattgggggacgctgcacactttcatcgggggtgtcaacaaacactccaccagcatcgggaaggtgtggatcacagtcatctttattttccgagtcatgatcctcgtggtggctgcccaggaagtgtggggtgacgagcaagaggacttcgtctgcaacacactgcaaccgggatgcaaaaatgtgtgctatgaccactttttcccggtgtcccacatccggctgtgggccctccagctgatcttcgtctccaccccagcgctgctggtggccatgcatgtggcctactacaggcacgaaaccactcgcaagttcaggcgaggagagaagaggaatgatttcaaagacatagaggacattaaaaagcagaaggttcggatagaggggtgactcgagcaccaccaccaccaccactgagatccggctgctaacaaagcccgaaaggaagctgagttggctgctgccaccgctgagcaataactagcataaccccttggggcctctaaacgggtcttgaggggttttttgctgaaaggaggaactatatccggat

SEQ ID NO: 352 - protein, 267 aa, Homo sapiens
MHHHHHHTAASDNFQLSQGGQGFAIPIGQAMAIAGQIKLPTVHIGPTAFLGLGVVDNNGNGARVQRVVGSAPAASLGISTGDVITAVDGAPINSATAMADALNGHHPGDVISVTWQTKSGGTRTGNVTLAEGPPAEFMDWGTLHTFIGGVNKHSTSIGKVWITVIFIFRVMILVVAAQEVWGDEQEDFVCNTLQPGCKNVCYDHFFPVSHIRLWALQLIFVSTPALLVAMHVAYYRHETTRKFRRGEKRNDFKDIEDIKKQKVRIEG

SEQ ID NO: 353 - DNA, 900 bp, Homo sapiens
atgcatcaccatcaccatcacacggccgcgtccgataacttccagctgtcccagggtgggcagggattcgccattccgatcgggcaggcgatggcgatcgcgggccagatcaagcttcccaccgttcatatcgggcctaccgccttcctcggcttgggtgttgtcgacaacaacggcaacggcgcacgagtccaacgcgtggtcgggagcgctccggcggcaagtctcggcatctccaccggcgacgtgatcaccgcggtcgacggcgctccgatcaactcggccaccgcgatggcggacgcgcttaacgggcatcatcccggtgacgtcatctcggtgacctggcaaaccaagtcgggcggcacgcgtacagggaacgtgacattggccgagggacccccggccgaattccacgaaaccactcgcaagttcaggcgaggagagaagaggaatgatttcaaagacatagaggacattaaaaagcagaaggttcggatagaggggtcgctgtggtggacgtacaccagcagcatctttttccgaatcatctttgaagcagcctttatgtatgtgttttacttcctttacaatgggtaccacctgccctgggtgttgaaatgtgggattgacccctgccccaaccttgttgactgctttatttctaggccaacagagaagaccgtgtttaccatttttatgatttctgcgtctgtgatttgcatgctgcttaacgtggcagagttgtgctacctgctgctgaaagtgtgttttaggagatcaaagagagcacagacgcaaaaaaatcaccccaatcatgccctaaaggagagtaagcagaatgaaatgaatgagctgatttcagatagtggtcaaaatgcaatcacaggtttcccaagctaa

SEQ ID NO: 354 - protein, 299 aa, Homo sapiens
MHHHHHHTAASDNFQLSQGGQGFAIPIGQAMAIAGQIKLPTVHIGPTAFLGLGVVDNNGNGARVQRVVGSAPAASLGISTGDVITAVDGAPINSATAMADALNGHHPGDVISVTWQTKSGGTRTGNVTLAEGPPAEFHETTRKFRRGEKRNDFKDIEDIKKQKVRIEGSLWWTYTSSIFFRIIFEAAFMYVFYFLYNGYHLPWVLKCGIDPCPNLVDCFISRPTEKTVFTIFMISASVICMLLNVAELCYLLLKVCFRRSKRAQTQKNHPNHALKESKQNEMNELISDSGQNAITGFPS

SEQ ID NO: 355 - DNA, 24 bp, Artificial Sequence
  PCR primer
ggagtacagcttcaagacaatggg

SEQ ID NO: 356 - DNA, 31 bp, Artificial Sequence
  PCR primer
ccatgggaattcattataataattttgttcc

SEQ ID NO: 357 - protein, 920 aa, Homo sapiens
MQHHHHHHGVQLQDNGYNGLLIAINPQVPENQNLISNIKEMITEASFYLFNATKRRVFFRNIKILIPATWKANNNSKIKQESYEKANVIVTDWYGAHGDDPYTLQYRGCGKEGKYIHFTPNFLLNDNLTAGYGSRGRVFVHEWAHLRWGVFDEYNNDKPFYINGQNQIKVTRCSSDITGIFVCEKGPCPQENCIISKLFKEGCTFIYNSTQNATASIMFMQSLSSVVEFCNASTHNQEAPNLQNQMCSLRSAWDVITDSADFHHSFPMNGTELPPPPTFSLVEAGDKVVCLVLDVSSKMAEADRLLQLQQAAEFYLMQIVEIHTFVGIASFDSKGEIRAQLHQINSNDDRKLLVSYLPTTVSAKTDISICSGLKKGFEVVEKLNGKAYGSVMILVTSGDDKLLGNCLPTVLSSGSTIHSIALGSSAAPNLEELSRLTGGLKFFVPDISNSNSMIDAFSRISSGTGDIFQQHIQLESTGENVKPHHQLKNTVTVDNTVGNDTMFLVTWQASGPPEIILFDPDGRKYYTNNFITNLTFRTASLWIPGTAKPGHWTYTLNNTHHSLQALKVTVTSRASNSAVPPATVEAFVERDSLHFPHPVMIYANVKQGFYPILNATVTATVEPETGDPVTLRLLDDGAGADVIKNDGIYSRYFFSFAANGRYSLKVHVNHSPSISTPAHSIPGSHAMYVPGYTANGNIQMNAPRKSVGRNEEERKWGFSRVSSGGSFSVLGVPAGPHPDVFPPCKIIDLEAVKVEEELTLSWTAPGEDFDQGQATSYEIRMSKSLQNIQDDFNNAILVNTSKRNPQQAGIREIFTFSPQISTNGPEHQPNGETHESHRIYVAIRAMDRNSLQSAVSNIAQAPLFIPPNSDPVPARDYLILKGVLTAMGLIGIICLIIVVTHHTLSRKKRADKKENGTKLL

SEQ ID NO: 358 - DNA, 2773 bp, Homo sapiens
catatgcagcatcaccaccatcaccacggagtacagcttcaagacaatgggtataatggattgctcattgcaattaatcctcaggtacctgagaatcagaacctcatctcaaacattaaggaaatgataactgaagcttcattttacctatttaatgctaccaagagaagagtatttttcagaaatataaagattttaatacctgccacatggaaagctaataataacagcaaaataaaacaagaatcatatgaaaaggcaaatgtcatagtgactgactggtatggggcacatggagatgatccatacaccctacaatacagagggtgtggaaaagagggaaaatacattcatttcacacctaatttcctactgaatgataacttaacagctggctacggatcacgaggccgagtgtttgtccatgaatgggcccacctccgttggggtgtgttcgatgagtataacaatgacaaacctttctacataaatgggcaaaatcaaattaaagtgacaaggtgttcatctgacatcacaggcatttttgtgtgtgaaaaaggtccttgcccccaagaaaactgtattattagtaagctttttaaagaaggatgcacctttatctacaatagcacccaaaatgcaactgcatcaataatgttcatgcaaagtttatcttctgtggttgaattttgtaatgcaagtacccacaaccaagaagcaccaaacctacagaaccagatgtgcagcctcagaagtgcatgggatgtaatcacagactctgctgactttcaccacagctttcccatgaacgggactgagcttccacctcctcccacattctcgcttgtagaggctggtgacaaagtggtctgtttagtgctggatgtgtccagcaagatggcagaggctgacagactccttcaactacaacaagccgcagaattttatttgatgcagattgttgaaattcataccttcgtgggcattgccagtttcgacagcaaaggagagatcagagcccagctacaccaaattaacagcaatgatgatcgaaagttgctggtttcatatctgcccaccactgtatcagctaaaacagacatcagcatttgttcagggcttaagaaaggatttgaggtggttgaaaaactgaatggaaaagcttatggctctgtgatgatattagtgaccagcggagatgataagcttcttggcaattgcttacccactgtgctcagcagtggttcaacaattcactccattgccctgggttcatctgcagccccaaatctggaggaattatcacgtcttacaggaggtttaaagttctttgttccagatatatcaaactccaatagcatgattgatgctttcagtagaatttcctctggaactggagacattttccagcaacatattcagcttgaaagtacaggtgaaaatgtcaaacctcaccatcaattgaaaaacacagtgactgtggataatactgtgggcaacgacactatgtttctagttacgtggcaggccagtggtcctcctgagattatattatttgatcctgatggacgaaaatactacacaaataattttatcaccaatctaacttttcggacagctagtctttggattccaggaacagctaagcctgggcactggacttacaccctgaacaatacccatcattctctgcaagccctgaaagtgacagtgacctctcgcgcctccaactcagctgtgcccccagccactgtggaagcctttgtggaaagagacagcctccattttcctcatcctgtgatgatttatgccaatgtgaaacagggattttatcccattcttaatgccactgtcactgccacagttgagccagagactggagatcctgttacgctgagactccttgatgatggagcaggtgctgatgttataaaaaatgatggaatttactcgaggtattttttctcctttgctgcaaatggtagatatagcttgaaagtgcatgtcaatcactctcccagcataagcaccccagcccactctattccagggagtcatgctatgtatgtaccaggttacacagcaaacggtaatattcagatgaatgctccaaggaaatcagtaggcagaaatgaggaggagcgaaagtggggctttagccgagtcagctcaggaggctccttttcagtgctgggagttccagctggcccccaccctgatgtgtttccaccatgcaaaattattgacctggaagctgtaaaagtagaagaggaattgaccctatcttggacagcacctggagaagactttgatcagggccaggctacaagctatgaaataagaatgagtaaaagtctacagaatatccaagatgactttaacaatgctattttagtaaatacatcaaagcgaaatcctcagcaagctggcatcagggagatatttacgttctcaccccaaatttccacgaatggacctgaacatcagccaaatggagaaacacatgaaagccacagaatttatgttgcaatacgagcaatggataggaactccttacagtctgctgtatctaacattgcccaggcgcctctgtttattccccccaattctgatcctgtacctgccagagattatcttatattgaaaggagttttaacagcaatgggtttgataggaatcatttgccttattatagttgtgacacatcatactttaagcaggaaaaagagagcagacaagaaagagaatggaacaaaattattataatgaattc

SEQ ID NO: 359 - DNA, 25 bp, Artificial Sequence
  PCR primer
tggcagcccctcttcttcaagtggc

SEQ ID NO: 360 - DNA, 33 bp, Artificial Sequence
  PCR primer
cgccagaattcatcaaacaaatctgttagcacc

SEQ ID NO: 361 - protein, 77 aa, Homo sapiens
MQHHHHHHWQPLFFKWLLSCCPGSSQIAAAASTQPEDDINTQRKKSQEKMREVTDSPGRPRELTIPQTSSHGANRFV

SEQ ID NO: 362 - DNA, 244 bp, Homo sapiens
catatgcagcatcaccaccatcaccactggcagcccctcttcttcaagtggctcttgtcctgttgccctgggagttctcaaattgctgcagcagcctccacccagcctgaggatgacatcaatacacagaggaagaagagtcaggaaaagatgagagaagttacagactctcctgggcgaccccgagagcttaccattcctcagacttcttcacatggtgctaacagatttgtttgatgaattc

SEQ ID NO: 363 - protein, 20 aa, Homo sapiens
MWQPLFFKWLLSCCPGSSQI

SEQ ID NO: 364 - DNA, 60 bp, Homo sapiens
atgtggcagcccctcttcttcaagtggctcttgtcctgttgccctgggagttctcaaatt

SEQ ID NO: 365 - protein, 20 aa, Homo sapiens
GSSQIAAAASTQPEDDINTQ

SEQ ID NO: 366 - DNA, 60 bp, Homo sapiens
gggagttctcaaattgctgcagcagcctccacccagcctgaggatgacatcaatacacag

SEQ ID NO: 367 - protein, 20 aa, Homo sapiens
KPGHWTYTLNNTHHSLQALK

SEQ ID NO: 368 - DNA, 2343 bp, Homo sapiens
attccggagcgtttgcggcttcgcttcatggccgctctcccgcccctcctgggatctgtggggagctggggagcccgcagcggcccggagccggagctggcgagccgagcggagacctgtgcgccgcgcctctgaggcgcagcatgtgaagcggagacggcatccagtggggggcgagcctctcagccggccgggatggctaccacggccgagctcttcgaggagccttttgtggcagatgaatatattgaacgtcttgtatggagaaccccaggaggaggctctagaggtggacctgaagcttttgatcctaaaagattattagaagaatttgtaaatcatattcaggaactccagataatggatgaaaggattcagaggaaagtagagaaactagagcaacaatgtcagaaagaagccaaggaatttgccaagaaggtacaagagctgcagaaaagcaatcaggttgccttccaacatttccaagaactagatgagcacattagctatgtagcaactaaagtctgtcaccttggagaccagttagagggggtaaacacacccagacaacgggcagtggaggctcagaaattgatgaaatactttaatgagtttctagatggagaattgaaatctgatgtttttacaaattctgaaaagataaaggaagcagcagacatcattcagaagttgcacctaattgcccaagagttaccttttgatagattttcagaagttaaatccaaaattgcaagtaaataccatgatttagaatgccagctgattcaggagtttaccagtgctcaaagaagaggtgaaatctccagaatgagagaagtagcagcagttttacttcattttaagggttattcccattgtgttgatgtttatataaagcagtgccaggagggtgcttatttgagaaatgatatatttgaagacgctggaatactctgtcaaagagtgaacaaacaagttggagatatcttcagtaatccagaaacagtcctggctaaacttattcaaaatgtatttgaaatcaaactacagagttttgtgaaagagcagttagaagaatgtaggaagtccgatgcagagcaatatctcaaaaatctctatgatctgtatacaagaaccaccaatctttccagcaagctgatggagtttaatttaggtactgataaacagactttcttgtctaagcttatcaaatccattttcatttcctatttggagaactatattgaggtggagactggatatttgaaaagcagaagtgctatgatcctacagcgctattatgattcgaaaaaccatcaaaagagatccattggcacaggaggtattcaagatttgaaggaaagaattagacagcgtaccaacttaccacttgggccaagtatcgatactcatggggagacttttctatcccaagaagtggtggttaatcttttacaagaaaccaaacaagcctttgaaagatgtcataggctctctgatccttctgacttaccaaggaatgccttcagaatttttaccattcttgtggaatttttatgtattgagcatattgattatgctttggaaacaggacttgctggaattccctcttcagattctaggaatgcaaatctttattttttggacgttgtgcaacaggccaatactatttttcatctttttgacaaacagtttaatgatcaccttatgccactaataagctcttctcctaagttatctgaatgccttcagaagaaaaaagaaataattgaacaaatggagatgaaattggatactggcattgataggacattaaattgtatgattggacagatgaagcatattttggctgcagaacagaagaaaacagattttaagccagaagatgaaaacaatgttttgattcaatatactaatgcctgtgtaaaagtctgtgcttacgtaagaaaacaagtggagaagattaaaaattccatggatgggaagaatgtggatacagttttgatggaacttggagtacgttttcatcgacttatctatgagcatcttcaacaatattcctacagttgtatgggtggcatgttggccatttgtgatgtagccgaatataggaagtgtgccaaagacttcaagattccaatggtattacatctttttgatactctgcatgctctttgcaatcttctggtagttgccccagataatttaaagcaagtctgctcaggagaacaacttgctaatctggacaagaatatacttcactccttcgtacaacttcgtgctgattatagatctgcccgccttgctcgacacttcagctgagattgaatttacaaaggaatt

SEQ ID NO: 369 - protein, 708 aa, Homo sapiens
MATTAELFEEPFVADEYIERLVWRTPGGGSRGGPEAFDPKRLLEEFVNHIQELQIMDERIQRKVEKLEQQCQKEAKEFAKKVQELQKSNQVAFQHFQELDEHISYVATKVCHLGDQLEGVNTPRQRAVEAQKLMKYFNEFLDGELKSDVFTNSEKIKEAADIIQKLHLIAQELPFDRFSEVKSKIASKYHDLECQLIQEFTSAQRRGEISRMREVAAVLLHFKGYSHCVDVYIKQCQEGAYLRNDIFEDAGILCQRVNKQVGDIFSNPETVLAKLIQNVFEIKLQSFVKEQLEECRKSDAEQYLKNLYDLYTRTTNLSSKLMEFNLGTDKQTFLSKLIKSIFISYLENYIEVETGYLKSRSAMILQRYYDSKNHQKRSIGTGGIQDLKERIRQRTNLPLGPSIDTHGETFLSQEVVVNLLQETKQAFERCHRLSDPSDLPRNAFRIFTILVEFLCIEHIDYALETGLAGIPSSDSRNANLYFLDVVQQANTIFHLFDKQFNDHLMPLISSSPKLSECLQKKKEIIEQMEMKLDTGIDRTLNCMIGQMKHILAAEQKKTDFKPEDENNVLIQYTNACVKVCAYVRKQVEKIKNSMDGKNVDTVLMELGVRFHRLIYEHLQQYSYSCMGGMLAICDVAEYRKCAKDFKIPMVLHLFDTLHALCNLLVVAPDNLKQVCSGEQLANLDKNILHSFVQLRADYRSARLARHFS

SEQ ID NO: 370 - DNA, 60 bp, Homo sapiens
gtcaatcactctcccagcataagcaccccagcccactctattccagggagtcatgctatg

SEQ ID NO: 371 - DNA, 60 bp, Homo sapiens
agtagaatttcctctggaactggagacattttccagcaacatattcagcttgaaagtaca

SEQ ID NO: 372 - DNA, 60 bp, Homo sapiens
ccagagactggagatcctgttacgctgagactccttgatgatggagcaggtgctgatgtt

SEQ ID NO: 373 - DNA, 60 bp, Homo sapiens
ttacagtctgctgtatctaacattgcccaggcgcctctgtttattccccccaattctgat

SEQ ID NO: 374 - DNA, 60 bp, Homo sapiens
gctgtgcccccagccactgtggaagcctttgtggaaagagacagcctccattttcctcat

SEQ ID NO: 375 - DNA, 60 bp, Homo sapiens
aaaaacacagtgactgtggataatactgtgggcaacgacactatgtttctagttacgtgg

SEQ ID NO: 376 - protein, 20 aa, Homo sapiens
LQSAVSNIAQAPLFIPPNSD

SEQ ID NO: 377 - protein, 20 aa, Homo sapiens
VNHSPSISTPAHSIPGSHAM

SEQ ID NO: 378 - protein, 20 aa, Homo sapiens
PETGDPVTLRLLDDGAGADV

SEQ ID NO: 379 - protein, 20 aa, Homo sapiens
AVPPATVEAFVERDSLHFPH

SEQ ID NO: 380 - protein, 20 aa, Homo sapiens
SRISSGTGDIFQQHIQLEST

SEQ ID NO: 381 - protein, 20 aa, Homo sapiens
KNTVTVDNTVGNDTMFLVTW

SEQ ID NO: 382 - protein, 20 aa, Homo sapiens
KPGHWTYTLNNTHHSLQALK

SEQ ID NO: 383 - DNA, 29 bp, Artificial Sequence
  PCR primer
cggcgaattcatggattgggggacgctgc

SEQ ID NO: 384 - DNA, 35 bp, Artificial Sequence
  PCR primer
cggcctcgagtcacccctctatccgaaccttctgc

SEQ ID NO: 385 - DNA, 32 bp, Artificial Sequence
  PCR primer
cggcgaattccacgaaccactcgcaagttcag

SEQ ID NO: 386 - DNA, 30 bp, Artificial Sequence
  PCR primer
cggctcgagttagcttgggcctgtgattgc

SEQ ID NO: 387 - protein, 20 aa, Homo sapiens
FFKWLLSCCPGSSQIAAAAS

SEQ ID NO: 388 - protein, 19 aa, Homo sapiens
LSCCPGSSQIAAASTQPED

SEQ ID NO: 389 - protein, 20 aa, Homo sapiens
AAAASTQPEDDINTQRKKSQ

SEQ ID NO: 390 - protein, 20 aa, Homo sapiens
TQPEDDINTQRKKSQEKMRE

SEQ ID NO: 391 - protein, 20 aa, Homo sapiens
DINTQRKKSQEKMREVTDSP

SEQ ID NO: 392 - protein, 20 aa, Homo sapiens
RKKSQEKMREVTDSPGRPRE

SEQ ID NO: 393 - protein, 20 aa, Homo sapiens
EKMREVTDSPGRPRELTIPQ

SEQ ID NO: 394 - protein, 20 aa, Homo sapiens
VTDSPGRPRELTIPQTSSHG

SEQ ID NO: 395 - protein, 19 aa, Homo sapiens
GRPRELTIPQTSSHGANRF

SEQ ID NO: 396 - protein, 19 aa, Homo sapiens
MNKLYIGNLSENAAPSDLE

SEQ ID NO: 397 - protein, 20 aa, Homo sapiens
SENAAPSDLESIFKDAKIPV

SEQ ID NO: 398 - protein, 20 aa, Homo sapiens
SIFKDAKIPVSGPFLVKTGY

SEQ ID NO: 399 - protein, 20 aa, Homo sapiens
SGPFLVKTGYAFVDCPDESW

SEQ ID NO: 400 - protein, 20 aa, Homo sapiens
AFVDCPDESWALKAIEALSG

SEQ ID NO: 401 - protein, 20 aa, Homo sapiens
ALKAIEALSGKIELHGKPIE

SEQ ID NO: 402 - protein, 20 aa, Homo sapiens
KIELHGKPIEVEHSVPKRQR

SEQ ID NO: 403 - protein, 20 aa, Homo sapiens
VEHSVPKRQRIRKLQIRNIP

SEQ ID NO: 404 - protein, 20 aa, Homo sapiens
IRKLQIRNIPPHLQWEVLDS

SEQ ID NO: 405 - protein, 20 aa, Homo sapiens
AVVNVTYSSKDQARQALDKL

SEQ ID NO: 406 - protein, 20 aa, Homo sapiens
DQARQALDKLNGFQLENFTL

SEQ ID NO: 407 - protein, 20 aa, Homo sapiens
NGFQLENFTLKVAYIPDETA

SEQ ID NO: 408 - protein, 20 aa, Homo sapiens
KVAYIPDETAAQQNPLQQPR

SEQ ID NO: 409 - protein, 20 aa, Homo sapiens
AQQNPLQQPRGRRGLGQRGS

SEQ ID NO: 410 - protein, 20 aa, Homo sapiens
GRRGLGQRGSSRQGSPGSVS

SEQ ID NO: 411 - protein, 20 aa, Homo sapiens
SRQGSPGSVSKQKPCDLPLR

SEQ ID NO: 412 - protein, 20 aa, Homo sapiens
KQKPCDLPLRLLVPTQFVGA

SEQ ID NO: 413 - protein, 20 aa, Homo sapiens
LLVPTQFVGAIIGKEGATIR

SEQ ID NO: 414 - protein, 20 aa, Homo sapiens
IIGKEGATIRNITKQTQSKI

SEQ ID NO: 415 - protein, 20 aa, Homo sapiens
NITKQTQSKIDVHRKENAGA

SEQ ID NO: 416 - protein, 20 aa, Homo sapiens
DVHRKENAGAAEKSITILST

SEQ ID NO: 417 - protein, 20 aa, Homo sapiens
AEKSITILSTPEGTSAACKS

SEQ ID NO: 418 - protein, 20 aa, Homo sapiens
PEGTSAACKSILEIMHKEAQ

SEQ ID NO: 419 - protein, 20 aa, Homo sapiens
ILEIMHKEAQDIKFTEEIPL

SEQ ID NO: 420 - DNA, 455 bp, Homo sapiens
gaagacatgcttacttccccttcaccttccttcatgatgtgggaagagtgctgcaacccagccctagccaacgccgcatgagagggagtgtgccgagggcttctgagaaggtttctctcacatctagaaagaagcgcttaagatgtggcagcccctcttcttcaagtggctcttgtcctgttgccctgggagttctcaaattgctgcagcagcctccacccagcctgaggatgacatcaatacacagaggaagaagagtcaggaaaagatgagagaagttacagactctcctgggcgaccccgagagcttaccattcctcagacttcttcacatggtgctaacagatttgttcctaaaagtaaagctctagaggccgtcaaattggcaatagaagccgggttccaccatattgattctgcacatgtttacaataatgaggagcaggttggactgg

SEQ ID NO: 421 - DNA, 24 bp, Artificial Sequence
  PCR primer
actagtgtccgcgtggcggcctac

SEQ ID NO: 422 - DNA, 34 bp, Artificial Sequence
  PCR primer
catgagaattcatcacatgcccttgaaggctccc

SEQ ID NO: 423 - protein, 161 aa, Homo sapiens
MQHHHHHHHTSVRVAAYFENFLAAWRPVKASDGDYYTLAVPMGDVPMDGISVADIGAAVSSIFNSPEEFLGKAVGLSAEALTIQQYADVLSKALGKEVRDAKITPEAFEKLGFPAAKEIANMCRFYEMKPDRDVNLTHQLNPKVKSFSQFISENQGAFKGM

SEQ ID NO: 424 - DNA, 489 bp, Homo sapiens
atgcagcatcaccaccatcaccaccacactagtgtccgcgtggcggcctactttgaaaactttctcgcggcgtggcggcccgtgaaagcctctgatggagattactacaccttggctgtaccgatgggagatgtaccaatggatggtatctctgttgctgatattggagcagccgtctctagcatttttaattctccagaggaatttttaggcaaggccgtggggctcagtgcagaagcactaacaatacagcaatatgctgatgttttgtccaaggctttggggaaagaagtccgagatgcaaagattaccccggaagctttcgagaagctgggattccctgcagcaaaggaaatagccaatatgtgtcgtttctatgaaatgaagccagaccgagatgtcaatctcacccaccaactaaatcccaaagtcaaaagcttcagccagtttatctcagagaaccagggagccttcaagggcatgtgatga

SEQ ID NO: 425 - DNA, 32 bp, Artificial Sequence
  PCR primer
aacaaactgtatatcggaaacctcagcgagaa

SEQ ID NO: 426 - DNA, 33 bp, Artificial Sequence
  PCR primer
ccatagaattcattacttccgtcttgactgagg

SEQ ID NO: 427 - protein, 586 aa, Homo sapiens
MQHHHHHHNKLYIGNLSENAAPSDLESIFKDAKIPVSGPFLVKTGYAFVDCPDESWALKAIEALSGKIELHGKPIEVEHSVPKRQRIRKLQIRNIPPHLQWEVLDSLLVQYGVVESCEQVNTDSETAVVNVTYSSKDQARQALDKLNGFQLENFTLKVAYIPDETAAQQNPLQQPRGRRGLGQRGSSRQGSPGSVSKQKPCDLPLRLLVPTQFVGAIIGKEGATIRNITKQTQSKIDVHRKENAGAAEKSITILSTPEGTSAACKSILEIMHKEAQDIKFTEEIPLKILAHNNFVGRLIGKEGRNLKKIEQDTDTKITISPLQELTLYNPERTITVKGNVETCAKAEEEIMKKIRESYENDIASMNLQAHLIPGLNLNALGLFPPTSGMPPPTSGPPSAMTPPYPQFEQSETETVHLFIPALSVGAIIGKQGQHIKQLSRFAGASIKIAPAEAPDAKVRMVIITGPPEAQFKAQGRIYGKIKEENFVSPKEEVKLEAHIRVPSFAAGRVIGKGGKTVNELQNLSSAEVVVPRDQTPDENDQVVVKITGHFYACQVAQRKIQEILTQVKQHQQQKALQSGPPQSRRK

SEQ ID NO: 428 - DNA, 1764 bp, Homo sapiens
atgcagcatcaccaccatcaccacaacaaactgtatatcggaaacctcagcgagaacgccgccccctcggacctagaaagtatcttcaaggacgccaagatcccggtgtcgggacccttcctggtgaagactggctacgcgttcgtggactgcccggacgagagctgggccctcaaggccatcgaggcgctttcaggtaaaatagaactgcacgggaaacccatagaagttgagcactcggtcccaaaaaggcaaaggattcggaaacttcagatacgaaatatcccgcctcatttacagtgggaggtgctggatagtttactagtccagtatggagtggtggagagctgtgagcaagtgaacactgactcggaaactgcagttgtaaatgtaacctattccagtaaggaccaagctagacaagcactagacaaactgaatggatttcagttagagaatttcaccttgaaagtagcctatatccctgatgaaacggccgcccagcaaaaccccttgcagcagccccgaggtcgccgggggcttgggcagaggggctcctcaaggcaggggtctccaggatccgtatccaagcagaaaccatgtgatttgcctctgcgcctgctggttcccacccaatttgttggagccatcataggaaaagaaggtgccaccattcggaacatcaccaaacagacccagtctaaaatcgatgtccaccgtaaagaaaatgcgggggctgctgagaagtcgattactatcctctctactcctgaaggcacctctgcggcttgtaagtctattctggagattatgcataaggaagctcaagatataaaattcacagaagagatccccttgaagattttagctcataataactttgttggacgtcttattggtaaagaaggaagaaatcttaaaaaaattgagcaagacacagacactaaaatcacgatatctccattgcaggaattgacgctgtataatccagaacgcactattacagttaaaggcaatgttgagacatgtgccaaagctgaggaggagatcatgaagaaaatcagggagtcttatgaaaatgatattgcttctatgaatcttcaagcacatttaattcctggattaaatctgaacgccttgggtctgttcccacccacttcagggatgccacctcccacctcagggcccccttcagccatgactcctccctacccgcagtttgagcaatcagaaacggagactgttcatctgtttatcccagctctatcagtcggtgccatcatcggcaagcagggccagcacatcaagcagctttctcgctttgctggagcttcaattaagattgctccagcggaagcaccagatgctaaagtgaggatggtgattatcactggaccaccagaggctcagttcaaggctcagggaagaatttatggaaaaattaaagaagaaaactttgttagtcctaaagaagaggtgaaacttgaagctcatatcagagtgccatcctttgctgctggcagagttattggaaaaggaggcaaaacggtgaatgaacttcagaatttgtcaagtgcagaagttgttgtccctcgtgaccagacacctgatgagaatgaccaagtggttgtcaaaataactggtcacttctatgcttgccaggttgcccagagaaaaattcaggaaattctgactcaggtaaagcagcaccaacaacagaaggctctgcaaagtggaccacctcagtcaagacggaagtaatga

SEQ ID NO: 429 - DNA, 35 bp, Artificial Sequence
  PCR primer
ccatggaattcattatttcaatataagataatctc

SEQ ID NO: 430 - protein, 881 aa, Homo sapiens
MQHHHHHHGVQLQDNGYNGLLIAINPQVPENQNLISNIKEMITEASFYLFNATKRRVFFRNIKILIPATWKANNNSKIKQESYEKANVIVTDWYGAHGDDPYTLQYRGCGKEGKYIHFTPNFLLNDNLTAGYGSRGRVFVHEWAHLRWGVFDEYNNDKPFYINGQNQIKVTRCSSDITGIFVCEKGPCPQENCIISKLFKEGCTFIYNSTQNATASIMFMQSLSSVVEFCNASTHNQEAPNLQNQMCSLRSAWDVITDSADFHHSFPMNGTELPPPPTFSLVEAGDKVVCLVLDVSSKMAEADRLLQLQQAAEFYLMQIVEIHTFVGIASFDSKGEIRAQLHQINSNDDRKLLVSYLPTTVSAKTDISICSGLKKGFEVVEKLNGKAYGSVMILVTSGDDKLLGNCLPTVLSSGSTIHSIALGSSAAPNLEELSRLTGGLKFFVPDISNSNSMIDAFSRISSGTGDIFQQHIQLESTGENVKPHHQLKNTVTVDNTVGNDTMFLVTWQASGPPEIILFDPDGRKYYTNNFITNLTFRTASLWIPGTAKPGHWTYTLNNTHHSLQALKVTVTSRASNSAVPPATVEAFVERDSLHFPHPVMIYANVKQGFYPILNATVTATVEPETGDPVTLRLLDDGAGADVIKNDGIYSRYFFSFAANGRYSLKVHVNHSPSISTPAHSIPGSHAMYVPGYTANGNIQMNAPRKSVGRNEEERKWGFSRVSSGGSFSVLGVPAGPHPDVFPPCKIIDLEAVKVEEELTLSWTAPGEDFDQGQATSYEIRMSKSLQNIQDDFNNAILVNTSKRNPQQAGIREIFTFSPQISTNGPEHQPNGETHESHRIYVAIRAMDRNSLQSAVSNIAQAPLFIPPNSDPVPARDYLILK

SEQ ID NO: 431 - DNA, 2646 bp, Homo sapiens
atgcagcatcaccaccatcaccacggagtacagcttcaagacaatgggtataatggattgctcattgcaattaatcctcaggtacctgagaatcagaacctcatctcaaacattaaggaaatgataactgaagcttcattttacctatttaatgctaccaagagaagagtatttttcagaaatataaagattttaatacctgccacatggaaagctaataataacagcaaaataaaacaagaatcatatgaaaaggcaaatgtcatagtgactgactggtatggggcacatggagatgatccatacaccctacaatacagagggtgtggaaaagagggaaaatacattcatttcacacctaatttcctactgaatgataacttaacagctggctacggatcacgaggccgagtgtttgtccatgaatgggcccacctccgttggggtgtgttcgatgagtataacaatgacaaacctttctacataaatgggcaaaatcaaattaaagtgacaaggtgttcatctgacatcacaggcatttttgtgtgtgaaaaaggtccttgcccccaagaaaactgtattattagtaagctttttaaagaaggatgcacctttatctacaatagcacccaaaatgcaactgcatcaataatgttcatgcaaagtttatcttctgtggttgaattttgtaatgcaagtacccacaaccaagaagcaccaaacctacagaaccagatgtgcagcctcagaagtgcatgggatgtaatcacagactctgctgactttcaccacagctttcccatgaacgggactgagcttccacctcctcccacattctcgcttgtagaggctggtgacaaagtggtctgtttagtgctggatgtgtccagcaagatggcagaggctgacagactccttcaactacaacaagccgcagaattttatttgatgcagattgttgaaattcataccttcgtgggcattgccagtttcgacagcaaaggagagatcagagcccagctacaccaaattaacagcaatgatgatcgaaagttgctggtttcatatctgcccaccactgtatcagctaaaacagacatcagcatttgttcagggcttaagaaaggatttgaggtggttgaaaaactgaatggaaaagcttatggctctgtgatgatattagtgaccagcggagatgataagcttcttggcaattgcttacccactgtgctcagcagtggttcaacaattcactccattgccctgggttcatctgcagccccaaatctggaggaattatcacgtcttacaggaggtttaaagttctttgttccagatatatcaaactccaatagcatgattgatgctttcagtagaatttcctctggaactggagacattttccagcaacatattcagcttgaaagtacaggtgaaaatgtcaaacctcaccatcaattgaaaaacacagtgactgtggataatactgtgggcaacgacactatgtttctagttacgtggcaggccagtggtcctcctgagattatattatttgatcctgatggacgaaaatactacacaaataattttatcaccaatctaacttttcggacagctagtctttggattccaggaacagctaagcctgggcactggacttacaccctgaacaatacccatcattctctgcaagccctgaaagtgacagtgacctctcgcgcctccaactcagctgtgcccccagccactgtggaagcctttgtggaaagagacagcctccattttcctcatcctgtgatgatttatgccaatgtgaaacagggattttatcccattcttaatgccactgtcactgccacagttgagccagagactggagatcctgttacgctgagactccttgatgatggagcaggtgctgatgttataaaaaatgatggaatttactcgaggtattttttctcctttgctgcaaatggtagatatagcttgaaagtgcatgtcaatcactctcccagcataagcaccccagcccactctattccagggagtcatgctatgtatgtaccaggttacacagcaaacggtaatattcagatgaatgctccaaggaaatcagtaggcagaaatgaggaggagcgaaagtggggctttagccgagtcagctcaggaggctccttttcagtgctgggagttccagctggcccccaccctgatgtgtttccaccatgcaaaattattgacctggaagctgtaaaagtagaagaggaattgaccctatcttggacagcacctggagaagactttgatcagggccaggctacaagctatgaaataagaatgagtaaaagtctacagaatatccaagatgactttaacaatgctattttagtaaatacatcaaagcgaaatcctcagcaagctggcatcagggagatatttacgttctcaccccaaatttccacgaatggacctgaacatcagccaaatggagaaacacatgaaagccacagaatttatgttgcaatacgagcaatggataggaactccttacagtctgctgtatctaacattgcccaggcgcctctgtttattccccccaattctgatcctgtacctgccagagattatcttatattgaaataa

SEQ ID NO: 432 - DNA, 36 bp, Artificial Sequence
  PCR primer
cgcctgctcgagtcattaatattcatcagaaaatgg

SEQ ID NO: 433 - protein, 371 aa, Homo sapiens [sequence omitted]

SEQ ID NO: 434 - DNA, 1119 bp, Homo sapiens
atgcagcatcaccaccatcaccactggcagcccctcttcttcaagtggctcttgtcctgttgccctgggagttctcaaattgctgcagcagcctccacccagcctgaggatgacatcaatacacagaggaagaagagtcaggaaaagatgagagaagttacagactctcctgggcgaccccgagagcttaccattcctcagacttcttcacatggtgctaacagatttgttcctaaaagtaaagctctagaggccgtcaaattggcaatagaagccgggttccaccatattgattctgcacatgtttacaataatgaggagcaggttggactggccatccgaagcaagattgcagatggcagtgtgaagagagaagacatattctacacttcaaagctttggagcaattcccatcgaccagagttggtccgaccagccttggaaaggtcactgaaaaatcttcaattggactatgttgacctctatcttattcattttccagtgtctgtaaagccaggtgaggaagtgatcccaaaagatgaaaatggaaaaatactatttgacacagtggatctctgtgccacatgggaggccatggagaagtgtaaagatgcaggattggccaagtccatcggggtgtccaacttcaaccacaggctgctggagatgatcctcaacaagccagggctcaagtacaagcctgtctgcaaccaggtggaatgtcatccttacttcaaccagagaaaactgctggatttctgcaagtcaaaagacattgttctggttgcctatagtgctctgggatcccatcgagaagaaccatgggtggacccgaactccccggtgctcttggaggacccagtcctttgtgccttggcaaaaaagcacaagcgaaccccagccctgattgccctgcgctaccagctgcagcgtggggttgtggtcctggccaagagctacaatgagcagcgcatcagacagaacgtgcaggtgtttgaattccagttgacttcagaggagatgaaagccatagatggcctaaacagaaatgtgcgatatttgacccttgatatttttgctggcccccctaattatccattttctgatgaatattaatga

SEQ ID NO: 435 - DNA, 36 bp, Artificial Sequence
  Primer
ggatccgccgccaccatgacatccattcgagctgta

SEQ ID NO: 436 - DNA, 27 bp, Artificial Sequence
  Primer
gtcgactcagctggaccacagccgcag

SEQ ID NO: 437 - DNA, 37 bp, Artificial Sequence
  Primer
ggatccgccgccaccatggactcctggaccttctgct

SEQ ID NO: 438 - DNA, 27 bp, Artificial Sequence
  Primer
gtcgactcagaaatcctttctcttgac

SEQ ID NO: 439 - DNA, 933 bp, Homo sapiens
atggactcctggaccttctgctgtgtgtccctttgcatcctggtagcaaagcacacagatgctggagttatccagtcaccccggcacgaggtgacagagatgggacaagaagtgactctgagatgtaaaccaatttcaggacacgactaccttttctggtacagacagaccatgatgcggggactggagttgctcatttactttaacaacaacgttccgatagatgattcagggatgcccgaggatcgattctcagctaagatgcctaatgcatcattctccactctgaagatccagccctcagaacccagggactcagctgtgtacttctgtgccagcagtttagttggagcaaacactgaagctttctttggacaaggcaccagactcacagttgtagaggacctgaacaaggtgttcccacccgaggtcgctgtgtttgagccatcagaagcagagatctcccacacccaaaaggccacactggtgtgcctggccacaggcttcttccctgaccacgtggagctgagctggtgggtgaatgggaaggaggtgcacagtggggtcagcacggacccgcagcccctcaaggagcagcccgccctcaatgactccagatactgcctgagcagccgcctgagggtctcggccaccttctggcagaacccccgcaaccacttccgctgtcaagtccagttctacgggctctcggagaatgacgagtggacccaggatagggccaaacccgtcacccagatcgtcagcgccgaggcctggggtagagcagactgtggctttacctcggtgtcctaccagcaaggggtcctgtctgccaccatcctctatgagatcctgctagggaaggccaccctgtatgctgtgctggtcagcgcccttgtgttgatggccatggtcaagagaaaggatttctga

SEQ ID NO: 440 - DNA, 822 bp, Homo sapiens
atgacatccattcgagctgtatttatattcctgtggctgcagctggacttggtgaatggagagaatgtggagcagcatccttcaaccctgagtgtccaggagggagacagcgctgttatcaagtgtacttattcagacagtgcctcaaactacttcccttggtataagcaagaacttggaaaaagacctcagcttattatagacattcgttcaaatgtgggcgaaaagaaagaccaacgaattgctgttacattgaacaagacagccaaacatttctccctgcacatcacagagacccaacctgaagactcggctgtctacttctgtgcagcaagtatactgaacaccggtaaccagttctattttgggacagggacaagtttgacggtcattccaaatatccagaaccctgaccctgccgtgtaccagctgagagactctaaatccagtgacaagtctgtctgcctattcaccgattttgattctcaaacaaatgtgtcacaaagtaaggattctgatgtgtatatcacagacaaaactgtgctagacatgaggtctatggacttcaagagcaacagtgctgtggcctggagcaacaaatctgactttgcatgtgcaaacgccttcaacaacagcattattccagaagacaccttcttccccagcccagaaagttcctgtgatgtcaagctggtcgagaaaagctttgaaacagatacgaacctaaactttcaaaacctgtcagtgattgggttccgaatcctcctcctgaaagtggccgggtttaatctgctcatgacgctgcggctgtggtccagctga

SEQ ID NO: 441 - DNA, 2311 bp, Homo sapiens
gatttaatcctatgacaaactaagttggttctgtcttcacctgttttggtgaggttgtgtaagagttggtgtttgctcaggaagagatttaagcatgcttgcttacccagactcagagaagtctccctgttctgtcctagctatgttcctgtgttgtgtgcattcgtcttttccagagcaaaccgcccagagtagaagatggattggggcacgctgcagacgatcctggggggtgtgaacaaacactccaccagcattggaaagatctggctcaccgtcctcttcatttttcgcattatgatcctcgttgtggctgcaaaggaggtgtggggagatgagcaggccgactttgtctgcaacaccctgcagccaggctgcaagaacgtgtgctacgatcactacttccccatctcccacatccggctatgggccctgcagctgatcttcgtgtccagcccagcgctcctagtggccatgcacgtggcctaccggagacatgagaagaagaggaagttcatcaagggggagataaagagtgaatttaaggacatcgaggagatcaaaacccagaaggtccgcatcgaaggctccctgtggtggacctacacaagcagcatcttcttccgggtcatcttcgaagccgccttcatgtacgtcttctatgtcatgtacgacggcttctccatgcagcggctggtgaagtgcaacgcctggccttgtcccaacactgtggactgctttgtgtcccggcccacggagaagactgtcttcacagtgttcatgattgcagtgtctggaatttgcatcctgctgaatgtcactgaattgtgttatttgctaattagatattgttctgggaagtcaaaaaagccagtttaacgcattgcccagttgttagattaagaaatagacagcatgagagggatgaggcaacccgtgctcagctgtcaaggctcagtcgccagcatttcccaacacaaagattctgaccttaaatgcaaccatttgaaacccctgtaggcctcaggtgaaactccagatgccacaatgagctctgctcccctaaagcctcaaaacaaaggcctaattctatgcctgtcttaattttctttcacttaagttagttccactgagaccccaggctgttaggggttattggtgtaaggtactttcatattttaaacagaggatatcggcatttgtttctttctctgaggacaagagaaaaaagccaggttccacagaggacacagagaaggtttgggtgtcctcctggggttctttttgccaactttccccacgttaaaggtgaacattggttctttcatttgctttggaagttttaatctctaacagtggacaaagttaccagtgccttaaactctgttacactttttggaagtgaaaactttgtagtatgataggttattttgatgtaaagatgttctggataccattatatgttccccctgtttcagaggctcagattgtaatatgtaaatggtatgtcattcgctactatgatttaatttgaaatatggtcttttggttatgaatactttgcagcacagctgagagaggctgtctgttgtattcattgtggtcatagcacctaacaacattgtagcctcaatcgagtgagacagactagaagttcctagttggcttatgatagcaaatggcctcatgtcaaatattagatgtaattttgtgtaagaaatacagactggatgtaccaccaactactacctgtaatgacaggcctgtccaacacatctcccttttccatgctgtggtagccagcatcggaaagaacgctgatttaaagaggtgagcttgggaattttattgacacagtaccatttaatggggagacaaaaatgggggccaggggagggagaagtttctgtcgttaaaaacgagtttggaaagactggactctaaattctgttgattaaagatgagctttgtctaccttcaaaagtttgtttggcttacccccttcagcctccaattttttaagtgaaaatataactaataacatgtgaaaagaatagaagctaaggtttagataaatattgagcagatctataggaagattgaacctgaatattgccattatgcttgacatggtttccaaaaaatggtactccacatacttcagtgagggtaagtattttcctgttgtcaagaatagcattgtaaaagcattttgtaataataaagaatagctttaatgatatgcttgtaactaaaataattttgtaatgtatcaaatacatttaaaacattaaaatataatctctataat

SEQ ID NO: 442 - protein, 226 aa, Homo sapiens
MDWGTLQTILGGVNKHSTSIGKIWLTVLFIFRIMILVVAAKEVWGDEQADFVCNTLQPGCKNVCYDHYFPISHIRLWALQLIFVSSPALLVAMHVAYRRHEKKRKFIKGEIKSEFKDIEEIKTQKVRIEGSLWWTYTSSIFFRVIFEAAFMYVFYVMYDGFSMQRLVKCNAWPCPNTVDCFVSRPTEKTVFTVFMIAVSGICILLNVTELCYLLIRYCSGKSKKPV

SEQ ID NO: 443 - protein, 23 aa, Homo sapiens
VKLCGIDPCPNLVDCFISRPGCG

SEQ ID NO: 444 - DNA, 36 bp, Artificial Sequence
  PCR primer
caatcaggcatgcacaacaaactgtatatcggaaac

SEQ ID NO: 445 - DNA, 30 bp, Artificial Sequence
  PCR primer
cgtcaagatcttcattacttccgtcttgac

SEQ ID NO: 446 - protein, 579 aa, Homo sapiens; identical to SEQ ID NO: 348

SEQ ID NO: 447 - DNA, 1743 bp, Homo sapiens
atgaacaaactgtatatcggaaacctcagcgagaacgccgccccctcggacctagaaagtatcttcaaggacgccaagatcccggtgtcgggacccttcctggtgaagactggctacgcgttcgtggactgcccggacgagagctgggccctcaaggccatcgaggcgctttcaggtaaaatagaactgcacgggaaacccatagaagttgagcactcggtcccaaaaaggcaaaggattcggaaacttcagatacgaaatatcccgcctcatttacagtgggaggtgctggatagtttactagtccagtatggagtggtggagagctgtgagcaagtgaacactgactcggaaactgcagttgtaaatgtaacctattccagtaaggaccaagctagacaagcactagacaaactgaatggatttcagttagagaatttcaccttgaaagtagcctatatccctgatgaaacggccgcccagcaaaaccccttgcagcagccccgaggtcgccgggggcttgggcagaggggctcctcaaggcaggggtctccaggatccgtatccaagcagaaaccatgtgatttgcctctgcgcctgctggttcccacccaatttgttggagccatcataggaaaagaaggtgccaccattcggaacatcaccaaacagacccagtctaaaatcgatgtccaccgtaaagaaaatgcgggggctgctgagaagtcgattactatcctctctactcctgaaggcacctctgcggcttgtaagtctattctggagattatgcataaggaagctcaagatataaaattcacagaagagatccccttgaagattttagctcataataactttgttggacgtcttattggtaaagaaggaagaaatcttaaaaaaattgagcaagacacagacactaaaatcacgatatctccattgcaggaattgacgctgtataatccagaacgcactattacagttaaaggcaatgttgagacatgtgccaaagctgaggaggagatcatgaagaaaatcagggagtcttatgaaaatgatattgcttctatgaatcttcaagcacatttaattcctggattaaatctgaacgccttgggtctgttcccacccacttcagggatgccacctcccacctcagggcccccttcagccatgactcctccctacccgcagtttgagcaatcagaaacggagactgttcatctgtttatcccagctctatcagtcggtgccatcatcggcaagcagggccagcacatcaagcagctttctcgctttgctggagcttcaattaagattgctccagcggaagcaccagatgctaaagtgaggatggtgattatcactggaccaccagaggctcagttcaaggctcagggaagaatttatggaaaaattaaagaagaaaactttgttagtcctaaagaagaggtgaaacttgaagctcatatcagagtgccatcctttgctgctggcagagttattggaaaaggaggcaaaacggtgaatgaacttcagaatttgtcaagtgcagaagttgttgtccctcgtgaccagacacctgatgagaatgaccaagtggttgtcaaaataactggtcacttctatgcttgccaggttgcccagagaaaaattcaggaaattctgactcaggtaaagcagcaccaacaacagaaggctctgcaaagtggaccacctcagtcaagacggaagtaatga

SEQ ID NO: 448 - DNA, 35 bp, Artificial Sequence
  PCR primer
cgtactagcatatgaacaaactgtatatcggaaac

SEQ ID NO: 449 - protein, 579 aa, Homo sapiens; identical to SEQ ID NO: 348

SEQ ID NO: 450 - DNA, 1743 bp, Homo sapiens; identical to SEQ ID NO: 447

SEQ ID NO: 451 - protein, 25 aa, Homo sapiens
LGKEVRDAKITPEAFEKLGFPAAKE

SEQ ID NO: 452 - protein, 25 aa, Homo sapiens
KASDGDYYTLAVPMGDVPMDGISVA

SEQ ID NO: 453 - protein, 16 aa, Homo sapiens
PDRDVNLTHQLNPKVK

SEQ ID NO: 454 - protein, 20 aa, Homo sapiens
KIAPAEAPDAKVRMVIITGP

SEQ ID NO: 455 - protein, 20 aa, Homo sapiens
PDETAAQQNPLQQPRGRRGL

SEQ ID NO: 456 - protein, 20 aa, Homo sapiens
RTITVKGNVETCAKAEEEIM

SEQ ID NO: 457 - protein, 20 aa, Homo sapiens
AFVDCPDESWALKAIEALSG

SEQ ID NO: 458 - protein, 20 aa, Homo sapiens
IRKLQIRNIPPHLQWEVLDS

SEQ ID NO: 459 - protein, 20 aa, Homo sapiens
AQQNPLQQPRGRRGLGQRGS

SEQ ID NO: 460 - protein, 20 aa, Homo sapiens
DVHRKENAGAAEKSITILST

SEQ ID NO: 461 - protein, 20 aa, Homo sapiens
LYNPERTITVKGNVETCAKA

SEQ ID NO: 462 - protein, 20 aa, Homo sapiens
EEEIMKKIRESYENDIASMN

SEQ ID NO: 463 - protein, 20 aa, Homo sapiens
LNALGLFPPTSGMPPPTSGP

SEQ ID NO: 464 - protein, 20 aa, Homo sapiens
KIAPAEAPDAKVRMVIITGP

SEQ ID NO: 465 - protein, 18 aa, Homo sapiens
TGYAFVDCPDESWALKIE

SEQ ID NO: 466 - protein, 11 aa, Homo sapiens
FVDCPDESWAL

SEQ ID NO: 467 - DNA, 33 bp, Homo sapiens
ttcgtggactgcccggacgagagctgggccctc

SEQ ID NO: 468 - protein, 24 aa, Homo sapiens
IPDEMAAQQNPLQQPRGRRGLGQR

SEQ ID NO: 469 - protein, 24 aa, Homo sapiens
IPDETAAQQNPSPQLRGRRGPGQR

SEQ ID NO: 470 - protein, 20 aa, Homo sapiens
SGPFLVKTGYAFVDCPDESW

SEQ ID NO: 471 - protein, 70 aa, Homo sapiens
DQARQALDKLNGFQLENFTLKVAYIPDETAAQQNPLQQPRGRRGLGQRGSSRQGSPGSVSKQKPCDLPLR

SEQ ID NO: 472 - protein, 70 aa, Homo sapiens
KQKPCDLPLRLLVPTQFVGAIIGKEGATIRNITKQTQSKIDVHRKENAGAAEKSITILSTPEGTSAACKS

SEQ ID NO: 473 - protein, 70 aa, Homo sapiens
PEGTSAACKSILEIMHKEAQDIKFTEEIPLKILAHNNFVGRLIGKEGRNLKKIEQDTDTKITISPLQELT

SEQ ID NO: 474 - protein, 70 aa, Homo sapiens
ITISPLQELTLYNPERTITVKGNVETCAKAEEEIMKKIRESYENDIASMNLQAHLIPGLNLNALGLFPPT

SEQ ID NO: 475 - protein, 70 aa, Homo sapiens
LNALGLFPPTSGMPPPTSGPPSAMTPPYPQFEQSETETVHLFIPALSVGAIIGKQGQHIKQLSRFAGASI

SEQ ID NO: 476 - protein, 81 aa, Homo sapiens
KQLSRFAGASIKIAPAEAPDAKVRMVIITGPPEAQFKAQGRIYGKIKEENFVSPKEEVKLEAHIRVPSFAAGRVIGKGGKT

SEQ ID NO: 477 - protein, 80 aa, Homo sapiens
GRVIGKGGKTVNELQNLSSAEVVVPRDQTPDENDQVVVKITGHFYACQVAQRKIQEILTQVKQHQQQKALQSGPPQSRRK

SEQ ID NO: 478 - DNA, 1740 bp, Homo sapiens; identical to SEQ ID NO: 347

SEQ ID NO: 479 - DNA, 34555 bp, Homo sapiens
  misc_feature 34543,34544,34545,34546,34547: n = A,T,C or G
ttaattaacatcatcaataatataccttattttggattgaagccaatatgataatgagggggtggagtttgtgacgtggcgcggggcgtgggaacggggcgggtgacgtagtagtgtggcggaagtgtgatgttgcaagtgtggcggaacacatgtaagcgacggatgtggcaaaagtgacgtttttggtgtgcgccggtgtacacaggaagtgacaattttcgcgcggttttaggcggatgttgtagtaaatttgggcgtaaccgagtaagatttggccattttcgcgggaaaactgaataagaggaagtgaaatctgaataattttgtgttactcatagcgcgtaatactgtaatagtaatcaattacggggtcattagttcatagcccatatatggagttccgcgttacataacttacggtaaatggcccgcctggctgaccgcccaacgacccccgcccattgacgtcaataatgacgtatgttcccatagtaacgccaatagggactttccattgacgtcaatgggtggagtatttacggtaaactgcccacttggcagtacatcaagtgtatcatatgccaagtacgccccctattgacgtcaatgacggtaaatggcccgcctggcattatgcccagtacatgaccttatgggactttcctacttggcagtacatctacgtattagtcatcgctattaccatggtgatgcggttttggcagtacatcaatgggcgtggatagcggtttgactcacggggatttccaagtctccaccccattgacgtcaatgggagtttgttttggcaccaaaatcaacgggactttccaaaatgtcgtaacaactccgccccattgacgcaaatgggcggtaggcgtgtacggtgggaggtctatataagcagagctggtttagtgaaccgtcagatccgctagagatctggtaccgtcgacgcggccgctcgagcctaagcttctagagccgccaccatgaacaaactgtatatcggaaacctcagcgagaacgccgccccctcggacctagaaagtatcttcaaggacgccaagatcccggtgtcgggacccttcctggtgaagactggctacgcgttcgtggactgcccggacgagagctgggccctcaaggccatcgaggcgctttcaggtaaaatagaactgcacgggaaacccatagaagttgagcactcggtcccaaaaaggcaaaggattcggaaacttcagatacgaaatatcccgcctcatttacagtgggaggtgctggatagtttactagtccagtatggagtggtggagagctgtgagcaagtgaacactgactcggaaactgcagttgtaaatgtaacctattccagtaaggaccaagctagacaagcactagacaaactgaatggatttcagttagagaatttcaccttgaaagtagcctatatccctgatgaaacggccgcccagcaaaaccccttgcagcagccccgaggtcgccgggggcttgggcagaggggctcctcaaggcaggggtctccaggatccgtatccaagcagaaaccatgtgatttgcctctgcgcctgctggttcccacccaatttgttggagccatcataggaaaagaaggtgccaccattcggaacatcaccaaacagacccagtctaaaatcgatgtccaccgtaaagaaaatgcgggggctgctgagaagtcgattactatcctctctactcctgaaggcacctctgcggcttgtaagtctattctggagattatgcataaggaagctcaagatataaaattcacagaagagatccccttgaagattttagctcataataactttgttggacgtcttattggtaaagaaggaagaaatcttaaaaaaattgagcaagacacagacactaaaatcacgatatctccattgcaggaattgacgctgtataatccagaacgcactattacagttaaaggcaatgttgagacatgtgccaaagctgaggaggagatcatgaagaaaatcagggagtcttatgaaaatgatattgcttctatgaatcttcaagcacatttaattcctggattaaatctgaacgccttgggtctgttcccacccacttcagggatgccacctcccacctcagggcccccttcagccatgactcctccctacccgcagtttgagcaatcagaaacggagactgttcatctgtttatcccagctctatcagtcggtgccatcatcggcaagcagggccagcacatcaagcagctttctcgctttgctggagcttcaattaagattgctccagcggaagcaccagatgctaaagtgaggatggtgattatcactggaccaccagaggctcagttcaaggctcagggaagaatttatggaaaaattaaagaagaaaactttgttagtcctaaagaagaggtgaaacttgaagctcatatcagagtgccatcctttgctgctggcagagttattggaaaaggaggcaaaacggtgaatgaacttcagaatttgtcaagtgcagaagttgttgtccctcgtgaccagacacctgatgagaatgaccaagtggttgtcaaaataactggtcacttctatgcttgccaggttgcccagagaaaaattcaggaaattctgactcaggtaaagcagcaccaacaacagaaggctctgcaaagtggaccacctcagtcaagacggaagtaatctagagccgccaccatgaacaaactgtatatcggaaacctcagcgagaacgccgccccctcggacctagaaagtatcttcaaggacgccaagatcccggtgtcgggacccttcctggtgaagactggctacgcgttcgtggactgcccggacgagagctgggccctcaaggccatcgaggcgctttcaggtaaaatagaactgcacgggaaacccatagaagttgagcactcggtcccaaaaaggcaaaggattcggaaacttcagatacgaaatatcccgcctcatttacagtgggaggtgctggatagtttactagtccagtatggagtggtggagagctgtgagcaagtgaacactgactcggaaactgcagttgtaaatgtaacctattccagtaaggaccaagctagacaagcactagacaaactgaatggatttcagttagagaatttcaccttgaaagtagcctatatccctgatgaaacggccgcccagcaaaaccccttgcagcagccccgaggtcgccgggggcttgggcagaggggctcctcaaggcaggggtctccaggatccgtatccaagcagaaaccatgtgatttgcctctgcgcctgctggttcccacccaatttgttggagccatcataggaaaagaaggtgccaccattcggaacatcaccaaacagacccagtctaaaatcgatgtccaccgtaaagaaaatgcgggggctgctgagaagtcgattactatcctctctactcctgaaggcacctctgcggcttgtaagtctattctggagattatgcataaggaagctcaagatataaaattcacagaagagatccccttgaagattttagctcataataactttgttggacgtcttattggtaaagaaggaagaaatcttaaaaaaattgagcaagacacagacactaaaatcacgatatctccattgcaggaattgacgctgtataatccagaacgcactattacagttaaaggcaatgttgagacatgtgccaaagctgaggaggagatcatgaagaaaatcagggagtcttatgaaaatgatattgcttctatgaatcttcaagcacatttaattcctggattaaatctgaacgccttgggtctgttcccacccacttcagggatgccacctcccacctcagggcccccttcagccatgactcctccctacccgcagtttgagcaatcagaaacggagactgttcatctgtttatcccagctctatcagtcggtgccatcatcggcaagcagggccagcacatcaagcagctttctcgctttgctggagcttcaattaagattgctccagcggaagcaccagatgctaaagtgaggatggtgattatcactggaccaccagaggctcagttcaaggctcagggaagaatttatggaaaaattaaagaagaaaactttgttagtcctaaagaagaggtgaaacttgaagctcatatcagagtgccatcctttgctgctggcagagttattggaaaaggaggcaaaacggtgaatgaacttcagaatttgtcaagtgcagaagttgttgtccctcgtgaccagacacctgatgagaatgaccaagtggttgtcaaaataactggtcacttctatgcttgccaggttgcccagagaaaaattcaggaaattctgactcaggtaaagcagcaccaacaacagaaggctctgcaaagtggaccacctcagtcaagacggaagtaatctagataagatatccgatccaccggatctagataactgatcataatcagccataccacatttgtagaggttttacttgctttaaaaaacctcccacacctccccctgaacctgaaacataaaatgaatgcaattgttgttgttaacttgtttattgcagcttataatggttacaaataaagcaatagcatcacaaatttcacaaataaagcatttttttcactgcattctagttgtggtttgtccaaactcatcaatgtatcttaacgcggatctgggcgtggttaagggtgggaaagaatatataaggtgggggtcttatgtagttttgtatctgttttgcagcagccgccgccgccatgagcaccaactcgtttgatggaagcattgtgagctcatatttgacaacgcgcatgcccccatgggccggggtgcgtcagaatgtgatgggctccagcattgatggtcgccccgtcctgcccgcaaactctactaccttgacctacgagaccgtgtctggaacgccgttggagactgcagcctccgccgccgcttcagccgctgcagccaccgcccgcgggattgtgactgactttgctttcctgagcccgcttgcaagcagtgcagcttcccgttcatccgcccgcgatgacaagttgacggctcttttggcacaattggattctttgacccgggaacttaatgtcgtttctcagcagctgttggatctgcgccagcaggtttctgccctgaaggcttcctcccctcccaatgcggtttaaaacataaataaaaaaccagactctgtttggatttggatcaagcaagtgtcttgctgtctttatttaggggttttgcgcgcgcggtaggcccgggaccagcggtctcggtcgttgagggtcctgtgtattttttccaggacgtggtaaaggtgactctggatgttcagatacatgggcataagcccgtctctggggtggaggtagcaccactgcagagcttcatgctgcggggtggtgttgtagatgatccagtcgtagcaggagcgctgggcgtggtgcctaaaaatgtctttcagtagcaagctgattgccaggggcaggcccttggtgtaagtgtttacaaagcggttaagctgggatgggtgcatacgtggggatatgagatgcatcttggactgtatttttaggttggctatgttcccagccatatccctccggggattcatgttgtgcagaaccaccagcacagtgtatccggtgcacttgggaaatttgtcatgtagcttagaaggaaatgcgtggaagaacttggagacgcccttgtgacctccaagattttccatgcattcgtccataatgatggcaatgggcccacgggcggcggcctgggcgaagatatttctgggatcactaacgtcatagttgtgttccaggatgagatcgtcataggccatttttacaaagcgcgggcggagggtgccagactgcggtataatggttccatccggcccaggggcgtagttaccctcacagatttgcatttcccacgctttgagttcagatggggggatcatgtctacctgcggggcgatgaagaaaacggtttccggggtaggggagatcagctgggaagaaagcaggttcctgagcagctgcgacttaccgcagccggtgggcccgtaaatcacacctattaccggctgcaactggtagttaagagagctgcagctgccgtcatccctgagcaggggggccacttcgttaagcatgtccctgactcgcatgttttccctgaccaaatccgccagaaggcgctcgccgcccagcgatagcagttcttgcaaggaagcaaagtttttcaacggtttgagaccgtccgccgtaggcatgcttttgagcgtttgaccaagcagttccaggcggtcccacagctcggtcacctgctctacggcatctcgatccagcatatctcctcgtttcgcgggttggggcggctttcgctgtacggcagtagtcggtgctcgtccagacgggccagggtcatgtctttccacgggcgcagggtcctcgtcagcgtagtctgggtcacggtgaaggggtgcgctccgggctgcgcgctggccagggtgcgcttgaggctggtcctgctggtgctgaagcgctgccggtcttcgccctgcgcgtcggccaggtagcatttgaccatggtgtcatagtccagcccctccgcggcgtggcccttggcgcgcagcttgcccttggaggaggcgccgcacgaggggcagtgcagacttttgagggcgtagagcttgggcgcgagaaataccgattccggggagtaggcatccgcgccgcaggccccgcagacggtctcgcattccacgagccaggtgagctctggccgttcggggtcaaaaaccaggtttcccccatgctttttgatgcgtttcttacctctggtttccatgagccggtgtccacgctcggtgacgaaaaggctgtccgtgtccccgtatacagacttgagagggagtttgtatacagacttgagaggcctgtcctcgagcggtgttccgcggtcctcctcgtatagaaactcggaccactctgagacaaaggctcgcgtccaggccagcacgaaggaggctaagtgggaggggtagcggtcgttgtccactagggggtccactcgctccagggtgtgaagacacatgtcgccctcttcggcatcaaggaaggtgattggtttgtaggtgtaggccacgtgaccgggtgttcctgaaggggggctataaaagggggtgggggcgcgttcgtcctcactctcttccgcatcgctgtctgcgagggccagctgttggggtgagtactccctctgaaaagcgggcatgacttctgcgctaagattgtcagtttccaaaaacgaggaggatttgatattcacctggcccgcggtgatgcctttgagggtggccgcatccatctggtcagaaaagacaatctttttgttgtcaagcttggtggcaaacgacccgtagagggcgttggacagcaacttggcgatggagcgcagggtttggtttttgtcgcgatcggcgcgctccttggccgcgatgtttagctgcacgtattcgcgcgcaacgcaccgccattcgggaaagacggtggtgcgctcgtcgggcaccaggtgcacgcgccaaccgcggttgtgcagggtgacaaggtcaacgctggtggctacctctccgcgtaggcgctcgttggtccagcagaggcggccgcccttgcgcgagcagaatggcggtagggggtctagctgcgtctcgtccggggggtctgcgtccacggtaaagaccccgggcagcaggcgcgcgtcgaagtagtctatcttgcatccttgcaagtctagcgcctgctgccatgcgcgggcggcaagcgcgcgctcgtatgggttgagtgggggaccccatggcatggggtgggtgagcgcggaggcgtacatgccgcaaatgtcgtaaacgtagaggggctctctgagtattccaagatatgtagggtagcatcttccaccgcggatgctggcgcgcacgtaatcgtatagttcgtgcgagggagcgaggaggtcgggaccgaggttgctacgggcgggctgctctgctcggaagactatctgcctgaagatggcatgtgagttggatgatatggttggacgctggaagacgttgaagctggcgtctgtgagacctaccgcgtcacgcacgaaggaggcgtaggagtcgcgcagcttgttgaccagctcggcggtgacctgcacgtctagggcgcagtagtccagggtttccttgatgatgtcatacttatcctgtcccttttttttccacagctcgcggttgaggacaaactcttcgcggtctttccagtactcttggatcggaaacccgtcggcctccgaacggtaagagcctagcatgtagaactggttgacggcctggtaggcgcagcatcccttttctacgggtagcgcgtatgcctgcgcggccttccggagcgaggtgtgggtgagcgcaaaggtgtccctgaccatgactttgaggtactggtatttgaagtcagtgtcgtcgcatccgccctgctcccagagcaaaaagtccgtgcgctttttggaacgcggatttggcagggcgaaggtgacatcgttgaagagtatctttcccgcgcgaggcataaagttgcgtgtgatgcggaagggtcccggcacctcggaacggttgttaattacctgggcggcgagcacgatctcgtcaaagccgttgatgttgtggcccacaatgtaaagttccaagaagcgcgggatgcccttgatggaaggcaattttttaagttcctcgtaggtgagctcttcaggggagctgagcccgtgctctgaaagggcccagtctgcaagatgagggttggaagcgacgaatgagctccacaggtcacgggccattagcatttgcaggtggtcgcgaaaggtcctaaactggcgacctatggccattttttctggggtgatgcagtagaaggtaagcgggtcttgttcccagcggtcccatccaaggttcgcggctaggtctcgcgcggcagtcactagaggctcatctccgccgaacttcatgaccagcatgaagggcacgagctgcttcccaaaggcccccatccaagtataggtctctacatcgtaggtgacaaagagacgctcggtgcgaggatgcgagccgatcgggaagaactggatctcccgccaccaattggaggagtggctattgatgtggtgaaagtagaagtccctgcgacgggccgaacactcgtgctggcttttgtaaaaacgtgcgcagtactggcagcggtgcacgggctgtacatcctgcacgaggttgacctgacgaccgcgcacaaggaagcagagtgggaatttgagcccctcgcctggcgggtttggctggtggtcttctacttcggctgcttgtccttgaccgtctggctgctcgaggggagttacggtggatcggaccaccacgccgcgcgagcccaaagtccagatgtccgcgcgcggcggtcggagcttgatgacaacatcgcgcagatgggagctgtccatggtctggagctcccgcggcgtcaggtcaggcgggagctcctgcaggtttacctcgcatagacgggtcagggcgcgggctagatccaggtgatacctaatttccaggggctggttggtggcggcgtcgatggcttgcaagaggccgcatccccgcggcgcgactacggtaccgcgcggcgggcggtgggccgcgggggtgtccttggatgatgcatctaaaagcggtgacgcgggcgagcccccggaggtagggggggctccggacccgccgggagagggggcaggggcacgtcggcgccgcgcgcgggcaggagctggtgctgcgcgcgtaggttgctggcgaacgcgacgacgcggcggttgatctcctgaatctggcgcctctgcgtgaagacgacgggcccggtgagcttgagcctgaaagagagttcgacagaatcaatttcggtgtcgttgacggcggcctggcgcaaaatctcctgcacgtctcctgagttgtcttgataggcgatctcggccatgaactgctcgatctcttcctcctggagatctccgcgtccggctcgctccacggtggcggcgaggtcgttggaaatgcgggccatgagctgcgagaaggcgttgaggcctccctcgttccagacgcggctgtagaccacgcccccttcggcatcgcgggcgcgcatgaccacctgcgcgagattgagctccacgtgccgggcgaagacggcgtagtttcgcaggcgctgaaagaggtagttgagggtggtggcggtgtgttctgccacgaagaagtacataacccagcgtcgcaacgtggattcgttgatatcccccaaggcctcaaggcgctccatggcctcgtagaagtccacggcgaagttgaaaaactgggagttgcgcgccgacacggttaactcctcctccagaagacggatgagctcggcgacagtgtcgcgcacctcgcgctcaaaggctacaggggcctcttcttcttcttcaatctcctcttccataagggcctccccttcttcttcttctggcggcggtgggggaggggggacacggcggcgacgacggcgcaccgggaggcggtcgacaaagcgctcgatcatctccccgcggcgacggcgcatggtctcggtgacggcgcggccgttctcgcgggggcgcagttggaagacgccgcccgtcatgtcccggttatgggttggcggggggctgccatgcggcagggatacggcgctaacgatgcatctcaacaattgttgtgtaggtactccgccgccgagggacctgagcgagtccgcatcgaccggatcggaaaacctctcgagaaaggcgtctaaccagtcacagtcgcaaggtaggctgagcaccgtggcgggcggcagcgggcggcggtcggggttgtttctggcggaggtgctgctgatgatgtaattaaagtaggcggtcttgagacggcggatggtcgacagaagcaccatgtccttgggtccggcctgctgaatgcgcaggcggtcggccatgccccaggcttcgttttgacatcggcgcaggtctttgtagtagtcttgcatgagcctttctaccggcacttcttcttctccttcctcttgtcctgcatctcttgcatctatcgctgcggcggcggcggagtttggccgtaggtggcgccctcttcctcccatgcgtgtgaccccgaagcccctcatcggctgaagcagggctaggtcggcgacaacgcgctcggctaatatggcctgctgcacctgcgtgagggtagactggaagtcatccatgtccacaaagcggtggtatgcgcccgtgttgatggtgtaagtgcagttggccataacggaccagttaacggtctggtgacccggctgcgagagctcggtgtacctgagacgcgagtaagccctcgagtcaaatacgtagtcgttgcaagtccgcaccaggtactggtatcccaccaaaaagtgcggcggcggctggcggtagaggggccagcgtagggtggccggggctccgggggcgagatcttccaacataaggcgatgatatccgtagatgtacctggacatccaggtgatgccggcggcggtggtggaggcgcgcggaaagtcgcggacgcggttccagatgttgcgcagcggcaaaaagtgctccatggtcgggacgctctggccggtcaggcgcgcgcaatcgttgacgctctaccgtgcaaaaggagagcctgtaagcgggcactcttccgtggtctggtggataaattcgcaagggtatcatggcggacgaccggggttcgagccccgtatccggccgtccgccgtgatccatgcggttaccgcccgcgtgtcgaacccaggtgtgcgacgtcagacaacgggggagtgctccttttggcttccttccaggcgcggcggctgctgcgctagcttttttggccactggccgcgcgcagcgtaagcggttaggctggaaagcgaaagcattaagtggctcgctccctgtagccggagggttattttccaagggttgagtcgcgggacccccggttcgagtctcggaccggccggactgcggcgaacgggggtttgcctccccgtcatgcaagaccccgcttgcaaattcctccggaaacagggacgagccccttttttgcttttcccagatgcatccggtgctgcggcagatgcgcccccctcctcagcagcggcaagagcaagagcagcggcagacatgcagggcaccctcccctcctcctaccgcgtcaggaggggcgacatccgcggttgacgcggcagcagatggtgattacgaacccccgcggcgccgggcccggcactacctggacttggaggagggcgagggcctggcgcggctaggagcgccctctcctgagcggtacccaagggtgcagctgaagcgtgatacgcgtgaggcgtacgtgccgcggcagaacctgtttcgcgaccgcgagggagaggagcccgaggagatgcgggatcgaaagttccacgcagggcgcgagctgcggcatggcctgaatcgcgagcggttgctgcgcgaggaggactttgagcccgacgcgcgaaccgggattagtcccgcgcgcgcacacgtggcggccgccgacctggtaaccgcatacgagcagacggtgaaccaggagattaactttcaaaaaagctttaacaaccacgtgcgtacgcttgtggcgcgcgaggaggtggctataggactgatgcatctgtgggactttgtaagcgcgctggagcaaaacccaaatagcaagccgctcatggcgcagctgttccttatagtgcagcacagcagggacaacgaggcattcagggatgcgctgctaaacatagtagagcccgagggccgctggctgctcgatttgataaacatcctgcagagcatagtggtgcaggagcgcagcttgagcctggctgacaaggtggccgccatcaactattccatgcttagcctgggcaagttttacgcccgcaagatataccataccccttacgttcccatagacaaggaggtaaagatcgaggggttctacatgcgcatggcgctgaaggtgcttaccttgagcgacgacctgggcgtttatcgcaacgagcgcatccacaaggccgtgagcgtgagccggcggcgcgagctcagcgaccgcgagctgatgcacagcctgcaaagggccctggctggcacgggcagcggcgatagagaggccgagtcctactttgacgcgggcgctgacctgcgctgggccccaagccgacgcgccctggaggcagctggggccggacctgggctggcggtggcacccgcgcgcgctggcaacgtcggcggcgtggaggaatatgacgaggacgatgagtacgagccagaggacggcgagtactaagcggtgatgtttctgatcagatgatgcaagacgcaacggacccggcggtgcgggcggcgctgcagagccagccgtccggccttaactccacggacgactggcgccaggtcatggaccgcatcatgtcgctgactgcgcgcaatcctgacgcgttccggcagcagccgcaggccaaccggctctccgcaattctggaagcggtggtcccggcgcgcgcaaaccccacgcacgagaaggtgctggcgatcgtaaacgcgctggccgaaaacagggccatccggcccgacgaggccggcctggtctacgacgcgctgcttcagcgcgtggctcgttacaacagcggcaacgtgcagaccaacctggaccggctggtgggggatgtgcgcgaggccgtggcgcagcgtgagcgcgcgcagcagcagggcaacctgggctccatggttgcactaaacgccttcctgagtacacagcccgccaacgtgccgcggggacaggaggactacaccaactttgtgagcgcactgcggctaatggtgactgagacaccgcaaagtgaggtgtaccagtctgggccagactattttttccagaccagtagacaaggcctgcagaccgtaaacctgagccaggctttcaaaaacttgcaggggctgtggggggtgcgggctcccacaggcgaccgcgcgaccgtgtctagcttgctgacgcccaactcgcgcctgttgctgctgctaatagcgcccttcacggacagtggcagcgtgtcccgggacacatacctaggtcacttgctgacactgtaccgcgaggccataggtcaggcgcatgtggacgagcatactttccaggagattacaagtgtcagccgcgcgctggggcaggaggacacgggcagcctggaggcaaccctaaactacctgctgaccaaccggcggcagaagatcccctcgttgcacagtttaaacagcgaggaggagcgcattttgcgctacgtgcagcagagcgtgagccttaacctgatgcgcgacggggtaacgcccagcgtggcgctggacatgaccgcgcgcaacatggaaccgggcatgtatgcctcaaaccggccgtttatcaaccgcctaatggactacttgcatcgcgcggccgccgtgaaccccgagtatttcaccaatgccatcttgaacccgcactggctaccgccccctggtttctacaccgggggattcgaggtgcccgagggtaacgatggattcctctgggacgacatagacgacagcgtgttttccccgcaaccgcagaccctgctagagttgcaacagcgcgagcaggcagaggcggcgctgcgaaaggaaagcttccgcaggccaagcagcttgtccgatctaggcgctgcggccccgcggtcagatgctagtagcccatttccaagcttgatagggtctcttaccagcactcgcaccacccgcccgcgcctgctgggcgaggaggagtacctaaacaactcgctgctgcagccgcagcgcgaaaaaaacctgcctccggcatttcccaacaacgggatagagagcctagtggacaagatgagtagatggaagacgtacgcgcaggagcacagggacgtgccaggcccgcgcccgcccacccgtcgtcaaaggcacgaccgtcagcggggtctggtgtgggaggacgatgactcggcagacgacagcagcgtcctggatttgggagggagtggcaacccgtttgcgcaccttcgccccaggctggggagaatgttttaaaaaaaaaaaagcatgatgcaaaataaaaaactcaccaaggccatggcaccgagcgttggttttcttgtattccccttagtatgcggcgcgcggcgatgtatgaggaaggtcctcctccctcctacgagagtgtggtgagcgcggcgccagtggcggcggcgctgggttctcccttcgatgctcccctggacccgccgtttgtgcctccgcggtacctgcggcctaccggggggagaaacagcatccgttactctgagttggcacccctattcgacaccacccgtgtgtacctggtggacaacaagtcaacggatgtggcatccctgaactaccagaacgaccacagcaactttctgaccacggtcattcaaaacaatgactacagcccgggggaggcaagcacacagaccatcaatcttgacgaccggtcgcactggggcggcgacctgaaaaccatcctgcataccaacatgccaaatgtgaacgagttcatgtttaccaataagtttaaggcgcgggtgatggtgtcgcgcttgcctactaaggacaatcaggtggagctgaaatacgagtgggtggagttcacgctgcccgagggcaactactccgagaccatgaccatagaccttatgaacaacgcgatcgtggagcactacttgaaagtgggcagacagaacggggttctggaaagcgacatcggggtaaagtttgacacccgcaacttcagactggggtttgaccccgtcactggtcttgtcatgcctggggtatatacaaacgaagccttccatccagacatcattttgctgccaggatgcggggtggacttcacccacagccgcctgagcaacttgttgggcatccgcaagcggcaacccttccaggagggctttaggatcacctacgatgatctggagggtggtaacattcccgcactgttggatgtggacgcctaccaggcgagcttgaaagatgacaccgaacagggcgggggtggcgcaggcggcagcaacagcagtggcagcggcgcggaagagaactccaacgcggcagccgcggcaatgcagccggtggaggacatgaacgatcatgccattcgcggcgacacctttgccacacgggctgaggagaagcgcgctgaggccgaagcagcggccgaagctgccgcccccgctgcgcaacccgaggtcgagaagcctcagaagaaaccggtgatcaaacccctgacagaggacagcaagaaacgcagttacaacctaataagcaatgacagcaccttcacccagtaccgcagctggtaccttgcatacaactacggcgaccctcagaccggaatccgctcatggaccctgctttgcactcctgacgtaacctgcggctcggagcaggtctactggtcgttgccagacatgatgcaagaccccgtgaccttccgctccacgcgccagatcagcaactttccggtggtgggcgccgagctgttgcccgtgcactccaagagcttctacaacgaccaggccgtctactcccaactcatccgccagtttacctctctgacccacgtgttcaatcgctttcccgagaaccagattttggcgcgcccgccagcccccaccatcaccaccgtcagtgaaaacgttcctgctctcacagatcacgggacgctaccgctgcgcaacagcatcggaggagtccagcgagtgaccattactgacgccagacgccgcacctgcccctacgtttacaaggccctgggcatagtctcgccgcgcgtcctatcgagccgcactttttgagcaagcatgtccatccttatatcgcccagcaataacacaggctggggcctgcgcttcccaagcaagatgtttggcggggccaagaagcgctccgaccaacacccagtgcgcgtgcgcgggcactaccgcgcgccctggggcgcgcacaaacgcggccgcactgggcgcaccaccgtcgatgacgccatcgacgcggtggtggaggaggcgcgcaactacacgcccacgccgccaccagtgtccacagtggacgcggccattcagaccgtggtgcgcggagcccggcgctatgctaaaatgaagagacggcggaggcgcgtagcacgtcgccaccgccgccgacccggcactgccgcccaacgcgcggcggcggccctgcttaaccgcgcacgtcgcaccggccgacgggcggccatgcgggccgctcgaaggctggccgcgggtattgtcactgtgccccccaggtccaggcgacgagcggccgccgcagcagccgcggccattagtgctatgactcagggtcgcaggggcaacgtgtattgggtgcgcgactcggttagcggcctgcgcgtgcccgtgcgcacccgccccccgcgcaactagattgcaagaaaaaactacttagactcgtactgttgtatgtatccagcggcggcggcgcgcaacgaagctatgtccaagcgcaaaatcaaagaagagatgctccaggtcatcgcgccggagatctatggccccccgaagaaggaagagcaggattacaagccccgaaagctaaagcgggtcaaaaagaaaaagaaagatgatgatgatgaacttgacgacgaggtggaactgctgcacgctaccgcgcccaggcgacgggtacagtggaaaggtcgacgcgtaaaacgtgttttgcgacccggcaccaccgtagtctttacgcccggtgagcgctccacccgcacctacaagcgcgtgtatgatgaggtgtacggcgacgaggacctgcttgagcaggccaacgagcgcctcggggagtttgcctacggaaagcggcataaggacatgctggcgttgccgctggacgagggcaacccaacacctagcctaaagcccgtaacactgcagcaggtgctgcccgcgcttgcaccgtccgaagaaaagcgcggcctaaagcgcgagtctggtgacttggcacccaccgtgcagctgatggtacccaagcgccagcgactggaagatgtcttggaaaaaatgaccgtggaacctgggctggagcccgaggtccgcgtgcggccaatcaagcaggtggcgccgggactgggcgtgcagaccgtggacgttcagatacccactaccagtagcaccagtattgccaccgccacagagggcatggagacacaaacgtccccggttgcctcagcggtggcggatgccgcggtgcaggcggtcgctgcggccgcgtccaagacctctacggaggtgcaaacggacccgtggatgtttcgcgtttcagccccccggcgcccgcgcggttcgaggaagtacggcgccgccagcgcgctactgcccgaatatgccctacatccttccattgcgcctacccccggctatcgtggctacacctaccgccccagaagacgagcaactacccgacgccgaaccaccactggaacccgccgccgccgtcgccgtcgccagcccgtgctggccccgatttccgtgcgcagggtggctcgcgaaggaggcaggaccctggtgctgccaacagcgcgctaccaccccagcatcgtttaaaagccggtctttgtggttcttgcagatatggccctcacctgccgcctccgtttcccggtgccgggattccgaggaagaatgcaccgtaggaggggcatggccggccacggcctgacgggcggcatgcgtcgtgcgcaccaccggcggcggcgcgcgtcgcaccgtcgcatgcgcggcggtatcctgcccctccttattccactgatcgccgcggcgattggcgccgtgcccggaattgcatccgtggccttgcaggcgcagagacactgattaaaaacaagttgcatgtggaaaaatcaaaataaaaagtctggactctcacgctcgcttggtcctgtaactattttgtagaatggaagacatcaactttgcgtctctggccccgcgacacggctcgcgcccgttcatgggaaactggcaagatatcggcaccagcaatatgagcggtggcgccttcagctggggctcgctgtggagcggcattaaaaatttcggttccaccgttaagaactatggcagcaaggcctggaacagcagcacaggccagatgctgagggataagttgaaagagcaaaatttccaacaaaaggtggtagatggcctggcctctggcattagcggggtggtggacctggccaaccaggcagtgcaaaataagattaacagtaagcttgatccccgccctcccgtagaggagcctccaccggccgtggagacagtgtctccagaggggcgtggcgaaaagcgtccgcgccccgacagggaagaaactctggtgacgcaaatagacgagcctccctcgtacgaggaggcactaaagcaaggcctgcccaccacccgtcccatcgcgcccatggctaccggagtgctgggccagcacacacccgtaacgctggacctgcctccccccgccgacacccagcagaaacctgtgctgccaggcccgaccgccgttgttgtaacccgtcctagccgcgcgtccctgcgccgcgccgccagcggtccgcgatcgttgcggcccgtagccagtggcaactggcaaagcacactgaacagcatcgtgggtctgggggtgcaatccctgaagcgccgacgatgcttctgaatagctaacgtgtcgtatgtgtgtcatgtatgcgtccatgtcgccgccagaggagctgctgagccgccgcgcgcccgctttccaagatggctaccccttcgatgatgccgcagtggtcttacatgcacatctcgggccaggacgcctcggagtacctgagccccgggctggtgcagtttgcccgcgccaccgagacgtacttcagcctgaataacaagtttagaaaccccacggtggcgcctacgcacgacgtgaccacagaccggtcccagcgtttgacgctgcggttcatccctgtggaccgtgaggatactgcgtactcgtacaaggcgcggttcaccctagctgtgggtgataaccgtgtgctggacatggcttccacgtactttgacatccgcggcgtgctggacaggggccctacttttaagccctactctggcactgcctacaacgccctggctcccaagggtgccccaaatccttgcgaatgggatgaagctgctactgctcttgaaataaacctagaagaagaggacgatgacaacgaagacgaagtagacgagcaagctgagcagcaaaaaactcacgtatttgggcaggcgccttattctggtataaatattacaaaggagggtattcaaataggtgtcgaaggtcaaacacctaaatatgccgataaaacatttcaacctgaacctcaaataggagaatctcagtggtacgaaactgaaattaatcatgcagctgggagagtccttaaaaagactaccccaatgaaaccatgttacggttcatatgcaaaacccacaaatgaaaatggagggcaaggcattcttgtaaagcaacaaaatggaaagctagaaagtcaagtggaaatgcaatttttctcaactactgaggcgaccgcaggcaatggtgataacttgactcctaaagtggtattgtacagtgaagatgtagatatagaaaccccagacactcatatttcttacatgcccactattaaggaaggtaactcacgagaactaatgggccaacaatctatgcccaacaggcctaattacattgcttttagggacaattttattggtctaatgtattacaacagcacgggtaatatgggtgttctggcgggccaagcatcgcagttgaatgctgttgtagatttgcaagacagaaacacagagctttcataccagcttttgcttgattccattggtgatagaaccaggtacttttctatgtggaatcaggctgttgacagctatgatccagatgttagaattattgaaaatcatggaactgaagatgaacttccaaattactgctttccactgggaggtgtgattaatacagagactcttaccaaggtaaaacctaaaacaggtcaggaaaatggatgggaaaaagatgctacagaattttcagataaaaatgaaataagagttggaaataattttgccatggaaatcaatctaaatgccaacctgtggagaaatttcctgtactccaacatagcgctgtatttgcccgacaagctaaagtacagtccttccaacgtaaaaatttctgataacccaaacacctacgactacatgaacaagcgagtggtggctcccgggttagtggactgctacattaaccttggagcacgctggtcccttgactatatggacaacgtcaacccatttaaccaccaccgcaatgctggcctgcgctaccgctcaatgttgctgggcaatggtcgctatgtgcccttccacatccaggtgcctcagaagttctttgccattaaaaacctccttctcctgccgggctcatacacctacgagtggaacttcaggaaggatgttaacatggttctgcagagctccctaggaaatgacctaagggttgacggagccagcattaagtttgatagcatttgcctttacgccaccttcttccccatggcccacaacaccgcctccacgcttgaggccatgcttagaaacgacaccaacgaccagtcctttaacgactatctctccgccgccaacatgctctaccctatacccgccaacgctaccaacgtgcccatatccatcccctcccgcaactgggcggctttccgcggctgggccttcacgcgccttaagactaaggaaaccccatcactgggctcgggctacgacccttattacacctactctggctctataccctacctagatggaaccttttacctcaaccacacctttaagaaggtggccattacctttgactcttctgtcagctggcctggcaatgaccgcctgcttacccccaacgagtttgaaattaagcgctcagttgacggggagggttacaacgttgcccagtgtaacatgaccaaagactggttcctggtacaaatgctagctaactacaacattggctaccagggcttctatatcccagagagctacaaggaccgcatgtactccttctttagaaacttccagcccatgagccgtcaggtggtggatgatactaaatacaaggactaccaacaggtgggcatcctacaccaacacaacaactctggatttgttggctaccttgcccccaccatgcgcgaaggacaggcctaccctgctaacttcccctatccgcttataggcaagaccgcagttgacagcattacccagaaaaagtttctttgcgatcgcaccctttggcgcatcccattctccagtaactttatgtccatgggcgcactcacagacctgggccaaaaccttctctacgccaactccgcccacgcgctagacatgacttttgaggtggatcccatggacgagcccacccttctttatgttttgtttgaagtctttgacgtggtccgtgtgcaccggccgcaccgcggcgtcatcgaaaccgtgtacctgcgcacgcccttctcggccggcaacgccacaacataaagaagcaagcaacatcaacaacagctgccgccatgggctccagtgagcaggaactgaaagccattgtcaaagatcttggttgtgggccatattttttgggcacctatgacaagcgctttccaggctttgtttctccacacaagctcgcctgcgccatagtcaatacggccggtcgcgagactgggggcgtacactggatggcctttgcctggaacccgcactcaaaaacatgctacctctttgagccctttggcttttctgaccagcgactcaagcaggtttaccagtttgagtacgagtcactcctgcgccgtagcgccattgcttcttcccccgaccgctgtataacgctggaaaagtccacccaaagcgtacaggggcccaactcggccgcctgtggactattctgctgcatgtttctccacgcctttgccaactggccccaaactcccatggatcacaaccccaccatgaaccttattaccggggtacccaactccatgctcaacagtccccaggtacagcccaccctgcgtcgcaaccaggaacagctctacagcttcctggagcgccactcgccctacttccgcagccacagtgcgcagattaggagcgccacttctttttgtcacttgaaaaacatgtaaaaataatgtactagagacactttcaataaaggcaaatgcttttatttgtacactctcgggtgattatttacccccacccttgccgtctgcgccgtttaaaaatcaaaggggttctgccgcgcatcgctatgcgccactggcagggacacgttgcgatactggtgtttagtgctccacttaaactcaggcacaaccatccgcggcagctcggtgaagttttcactccacaggctgcgcaccatcaccaacgcgtttagcaggtcgggcgccgatatcttgaagtcgcagttggggcctccgccctgcgcgcgcgagttgcgatacacagggttgcagcactggaacactatcagcgccgggtggtgcacgctggccagcacgctcttgtcggagatcagatccgcgtccaggtcctccgcgttgctcagggcgaacggagtcaactttggtagctgccttcccaaaaagggcgcgtgcccaggctttgagttgcactcgcaccgtagtggcatcaaaaggtgaccgtgcccggtctgggcgttaggatacagcgcctgcataaaagccttgatctgcttaaaagccacctgagcctttgcgccttcagagaagaacatgccgcaagacttgccggaaaactgattggccggacaggccgcgtcgtgcacgcagcaccttgcgtcggtgttggagatctgcaccacatttcggccccaccggttcttcacgatcttggccttgctagactgctccttcagcgcgcgctgcccgttttcgctcgtcacatccatttcaatcacgtgctccttatttatcataatgcttccgtgtagacacttaagctcgccttcgatctcagcgcagcggtgcagccacaacgcgcagcccgtgggctcgtgatgcttgtaggtcacctctgcaaacgactgcaggtacgcctgcaggaatcgccccatcatcgtcacaaaggtcttgttgctggtgaaggtcagctgcaacccgcggtgctcctcgttcagccaggtcttgcatacggccgccagagcttccacttggtcaggcagtagtttgaagttcgcctttagatcgttatccacgtggtacttgtccatcagcgcgcgcgcagcctccatgcccttctcccacgcagacacgatcggcacactcagcgggttcatcaccgtaatttcactttccgcttcgctgggctcttcctcttcctcttgcgtccgcataccacgcgccactgggtcgtcttcattcagccgccgcactgtgcgcttacctcctttgccatgcttgattagcaccggtgggttgctgaaacccaccatttgtagcgccacatcttctctttcttcctcgctgtccacgattacctctggtgatggcgggcgctcgggcttgggagaagggcgcttctttttcttcttgggcgcaatggccaaatccgccgccgaggtcgatggccgcgggctgggtgtgcgcggcaccagcgcgtcttgtgatgagtcttcctcgtcctcggactcgatacgccgcctcatccgcttttttgggggcgcccggggaggcggcggcgacggggacggggacgacacgtcctccatggttgggggacgtcgcgccgcaccgcgtccgcgctcgggggtggtttcgcgctgctcctcttcccgactggccatttccttctcctataggcagaaaaagatcatggagtcagtcgagaagaaggacagcctaaccgccccctctgagttcgccaccaccgcctccaccgatgccgccaacgcgcctaccaccttccccgtcgaggcacccccgcttgaggaggaggaagtgattatcgagcaggacccaggttttgtaagcgaagacgacgaggaccgctcagtaccaacagaggataaaaagcaagaccaggacaacgcagaggcaaacgaggaacaagtcgggcggggggacgaaaggcatggcgactacctagatgtgggagacgacgtgctgttgaagcatctgcagcgccagtgcgccattatctgcgacgcgttgcaagagcgcagcgatgtgcccctcgccatagcggatgtcagccttgcctacgaacgccacctattctcaccgcgcgtaccccccaaacgccaagaaaacggcacatgcgagcccaacccgcgcctcaacttctaccccgtatttgccgtgccagaggtgcttgccacctatcacatctttttccaaaactgcaagatacccctatcctgccgtgccaaccgcagccgagcggacaagcagctggccttgcggcagggcgctgtcatacctgatatcgcctcgctcaacgaagtgccaaaaatctttgagggtcttggacgcgacgagaagcgcgcggcaaacgctctgcaacaggaaaacagcgaaaatgaaagtcactctggagtgttggtggaactcgagggtgacaacgcgcgcctagccgtactaaaacgcagcatcgaggtcacccactttgcctacccggcacttaacctaccccccaaggtcatgagcacagtcatgagtgagctgatcgtgcgccgtgcgcagcccctggagagggatgcaaatttgcaagaacaaacagaggagggcctacccgcagttggcgacgagcagctagcgcgctggcttcaaacgcgcgagcctgccgacttggaggagcgacgcaaactaatgatggccgcagtgctcgttaccgtggagcttgagtgcatgcagcggttctttgctgacccggagatgcagcgcaagctagaggaaacattgcactacacctttcgacagggctacgtacgccaggcctgcaagatctccaacgtggagctctgcaacctggtctcctaccttggaattttgcacgaaaaccgccttgggcaaaacgtgcttcattccacgctcaagggcgaggcgcgccgcgactacgtccgcgactgcgtttacttatttctatgctacacctggcagacggccatgggcgtttggcagcagtgcttggaggagtgcaacctcaaggagctgcagaaactgctaaagcaaaacttgaaggacctatggacggccttcaacgagcgctccgtggccgcgcacctggcggacatcattttccccgaacgcctgcttaaaaccctgcaacagggtctgccagacttcaccagtcaaagcatgttgcagaactttaggaactttatcctagagcgctcaggaatcttgcccgccacctgctgtgcacttcctagcgactttgtgcccattaagtaccgcgaatgccctccgccgctttggggccactgctaccttctgcagctagccaactaccttgcctaccactctgacataatggaagacgtgagcggtgacggtctactggagtgtcactgtcgctgcaacctatgcaccccgcaccgctccctggtttgcaattcgcagctgcttaacgaaagtcaaattatcggtacctttgagctgcagggtccctcgcctgacgaaaagtccgcggctccggggttgaaactcactccggggctgtggacgtcggcttaccttcgcaaatttgtacctgaggactaccacgcccacgagattaggttctacgaagaccaatcccgcccgccaaatgcggagcttaccgcctgcgtcattacccagggccacattcttggccaattgcaagccatcaacaaagcccgccaagagtttctgctacgaaagggacggggggtttacttggacccccagtccggcgaggagctcaacccaatccccccgccgccgcagccctatcagcagcagccgcgggcccttgcttcccaggatggcacccaaaaagaagctgcagctgccgccgccacccacggacgaggaggaatactgggacagtcaggcagaggaggttttggacgaggaggaggaggacatgatggaagactgggagagcctagacgaggaagcttccgaggtcgaagaggtgtcagacgaaacaccgtcaccctcggtcgcattcccctcgccggcgccccagaaatcggcaaccggttccagcatggctacaacctccgctcctcaggcgccgccggcactgcccgttcgccgacccaaccgtagatgggacaccactggaaccagggccggtaagtccaagcagccgccgccgttagcccaagagcaacaacagcgccaaggctaccgctcatggcgcgggcacaagaacgccatagttgcttgcttgcaagactgtgggggcaacatctccttcgcccgccgctttcttctctaccatcacggcgtggccttcccccgtaacatcctgcattactaccgtcatctctacagcccatactgcaccggcggcagcggcagcggcagcaacagcagcggccacacagaagcaaaggcgaccggatagcaagactctgacaaagcccaagaaatccacagcggcggcagcagcaggaggaggagcgctgcgtctggcgcccaacgaacccgtatcgacccgcgagcttagaaacaggatttttcccactctgtatgctatatttcaacagagcaggggccaagaacaagagctgaaaataaaaaacaggtctctgcgatccctcacccgcagctgcctgtatcacaaaagcgaagatcagcttcggcgcacgctggaagacgcggaggctctcttcagtaaatactgcgcgctgactcttaaggactagtttcgcgccctttctcaaatttaagcgcgaaaactacgtcatctccagcggccacacccggcgccagcacctgtcgtcagcgccattatgagcaaggaaattcccacgccctacatgtggagttaccagccacaaatgggacttgcggctggagctgcccaagactactcaacccgaataaactacatgagcgcgggaccccacatgatatcccgggtcaacggaatccgcgcccaccgaaaccgaattctcttggaacaggcggctattaccaccacacctcgtaataaccttaatccccgtagttggcccgctgccctggtgtaccaggaaagtcccgctcccaccactgtggtacttcccagagacgcccaggccgaagttcagatgactaactcaggggcgcagcttgcgggcggctttcgtcacagggtgcggtcgcccgggcagggtataactcacctgacaatcagagggcgaggtattcagctcaacgacgagtcggtgagctcctcgcttggtctccgtccggacgggacatttcagatcggcggcgccggccgtccttcattcacgcctcgtcaggcaatcctaactctgcagacctcgtcctctgagccgcgctctggaggcattggaactctgcaatttattgaggagtttgtgccatcggtctactttaaccccttctcgggacctcccggccactatccggatcaatttattcctaactttgacgcggtaaaggactcggcggacggctacgactgaatgttaagtggagaggcagagcaactgcgcctgaaacacctggtccactgtcgccgccacaagtgctttgcccgcgactccggtgagttttgctactttgaattgcccgaggatcatatcgagggcccggcgcacggcgtccggcttaccgcccagggagagcttgcccgtagcctgattcgggagtttacccagcgccccctgctagttgagcgggacaggggaccctgtgttctcactgtgatttgcaactgtcctaaccttggattacatcaagatcctctagttataactagagtacccggggatcttattccctttaactaataaaaaaaaataataaagcatcacttacttaaaatcagttagcaaatttctgtccagtttattcagcagcacctccttgccctcctcccagctctggtattgcagcttcctcctggctgcaaactttctccacaatctaaatggaatgtcagtttcctcctgttcctgtccatccgcacccactatcttcatgttgttgcagatgaagcgcgcaagaccgtctgaagataccttcaaccccgtgtatccatatgacacggaaaccggtcctccaactgtgccttttcttactcctccctttgtatcccccaatgggtttcaagagagtccccctggggtactctctttgcgcctatccgaacctctagttacctccaatggcatgcttgcgctcaaaatgggcaacggcctctctctggacgaggccggcaaccttacctcccaaaatgtaaccactgtgagcccacctctcaaaaaaaccaagtcaaacataaacctggaaatatctgcacccctcacagttacctcagaagccctaactgtggctgccgccgcacctctaatggtcgcgggcaacacactcaccatgcaatcacaggccccgctaaccgtgcacgactccaaacttagcattgccacccaaggacccctcacagtgtcagaaggaaagctagccctgcaaacatcaggccccctcaccaccaccgatagcagtacccttactatcactgcctcaccccctctaactactgccactggtagcttgggcattgacttgaaagagcccatttatacacaaaatggaaaactaggactaaagtacggggctcctttgcatgtaacagacgacctaaacactttgaccgtagcaactggtccaggtgtgactattaataatacttccttgcaaactaaagttactggagccttgggttttgattcacaaggcaatatgcaacttaatgtagcaggaggactaaggattgattctcaaaacagacgccttatacttgatgttagttatccgtttgatgctcaaaaccaactaaatctaagactaggacagggccctctttttataaactcagcccacaacttggatattaactacaacaaaggcctttacttgtttacagcttcaaacaattccaaaaagcttgaggttaacctaagcactgccaaggggttgatgtttgacgctacagccatagccattaatgcaggagatgggcttgaatttggttcacctaatgcaccaaacacaaatcccctcaaaacaaaaattggccatggcctagaatttgattcaaacaaggctatggttcctaaactaggaactggccttagttttgacagcacaggtgccattacagtaggaaacaaaaataatgataagctaactttgtggaccacaccagctccatctcctaactgtagactaaatgcagagaaagatgctaaactcactttggtcttaacaaaatgtggcagtcaaatacttgctacagtttcagttttggctgttaaaggcagtttggctccaatatctggaacagttcaaagtgctcatcttattataagatttgacgaaaatggagtgctactaaacaattccttcctggacccagaatattggaactttagaaatggagatcttactgaaggcacagcctatacaaacgctgttggatttatgcctaacctatcagcttatccaaaatctcacggtaaaactgccaaaagtaacattgtcagtcaagtttacttaaacggagacaaaactaaacctgtaacactaaccattacactaaacggtacacaggaaacaggagacacaactccaagtgcatactctatgtcattttcatgggactggtctggccacaactacattaatgaaatatttgccacatcctcttacactttttcatacattgcccaagaataaagaatcgtttgtgttatgtttcaacgtgtttatttttcaattgcagaaaatttcaagtcatttttcattcagtagtatagccccaccaccacatagcttatacagatcaccgtaccttaatcaaactcacagaaccctagtattcaacctgccacctccctcccaacacacagagtacacagtcctttctccccggctggccttaaaaagcatcatatcatgggtaacagacatattcttaggtgttatattccacacggtttcctgtcgagccaaacgctcatcagtgatattaataaactccccgggcagctcacttaagttcatgtcgctgtccagctgctgagccacaggctgctgtccaacttgcggttgcttaacgggcggcgaaggagaagtccacgcctacatgggggtagagtcataatcgtgcatcaggatagggcggtggtgctgcagcagcgcgcgaataaactgctgccgccgccgctccgtcctgcaggaatacaacatggcagtggtctcctcagcgatgattcgcaccgcccgcagcataaggcgccttgtcctccgggcacagcagcgcaccctgatctcacttaaatcagcacagtaactgcagcacagcaccacaatattgttcaaaatcccacagtgcaaggcgctgtatccaaagctcatggcggggaccacagaacccacgtggccatcataccacaagcgcaggtagattaagtggcgacccctcataaacacgctggacataaacattacctcttttggcatgttgtaattcaccacctcccggtaccatataaacctctgattaaacatggcgccatccaccaccatcctaaaccagctggccaaaacctgcccgccggctatacactgcagggaaccgggactggaacaatgacagtggagagcccaggactcgtaaccatggatcatcatgctcgtcatgatatcaatgttggcacaacacaggcacacgtgcatacacttcctcaggattacaagctcctcccgcgttagaaccatatcccagggaacaacccattcctgaatcagcgtaaatcccacactgcagggaagacctcgcacgtaactcacgttgtgcattgtcaaagtgttacattcgggcagcagcggatgatcctccagtatggtagcgcgggtttctgtctcaaaaggaggtagacgatccctactgtacggagtgcgccgagacaaccgagatcgtgttggtcgtagtgtcatgccaaatggaacgccggacgtagtcatatttcctgaagcaaaaccaggtgcgggcgtgacaaacagatctgcgtctccggtctcgccgcttagatcgctctgtgtagtagttgtagtatatccactctctcaaagcatccaggcgccccctggcttcgggttctatgtaaactccttcatgcgccgctgccctgataacatccaccaccgcagaataagccacacccagccaacctacacattcgttctgcgagtcacacacgggaggagcgggaagagctggaagaaccatgtttttttttttattccaaaagattatccaaaacctcaaaatgaagatctattaagtgaacgcgctcccctccggtggcgtggtcaaactctacagccaaagaacagataatggcatttgtaagatgttgcacaatggcttccaaaaggcaaacggccctcacgtccaagtggacgtaaaggctaaacccttcagggtgaatctcctctataaacattccagcaccttcaaccatgcccaaataattctcatctcgccaccttctcaatatatctctaagcaaatcccgaatattaagtccggccattgtaaaaatctgctccagagcgccctccaccttcagcctcaagcagcgaatcatgattgcaaaaattcaggttcctcacagacctgtataagattcaaaagcggaacattaacaaaaataccgcgatcccgtaggtcccttcgcagggccagctgaacataatcgtgcaggtctgcacggaccagcgcggccacttccccgccaggaaccttgacaaaagaacccacactgattatgacacgcatactcggagctatgctaaccagcgtagccccgatgtaagctttgttgcatgggcggcgatataaaatgcaaggtgctgctcaaaaaatcaggcaaagcctcgcgcaaaaaagaaagcacatcgtagtcatgctcatgcagataaaggcaggtaagctccggaaccaccacagaaaaagacaccatttttctctcaaacatgtctgcgggtttctgcataaacacaaaataaaataacaaaaaaacatttaaacattagaagcctgtcttacaacaggaaaaacaacccttataagcataagacggactacggccatgccggcgtgaccgtaaaaaaactggtcaccgtgattaaaaagcaccaccgacagctcctcggtcatgtccggagtcataatgtaagactcggtaaacacatcaggttgattcatcggtcagtgctaaaaagcgaccgaaatagcccgggggaatacatacccgcaggcgtagagacaacattacagcccccataggaggtataacaaaattaataggagagaaaaacacataaacacctgaaaaaccctcctgcctaggcaaaatagcaccctcccgctccagaacaacatacagcgcttcacagcggcagcctaacagtcagccttaccagtaaaaaagaaaacctattaaaaaaacaccactcgacacggcaccagctcaatcagtcacagtgtaaaaaagggccaagtgcagagcgagtatatataggactaaaaaatgacgtaacggttaaagtccacaaaaaacacccagaaaaccgcacgcgaacctacgcccagaaacgaaagccaaaaaacccacaacttcctcaaatcgtcacttccgttttcccacgttacgtaacttcccattttaagaaaactacaattcccaacacatacaagttactccgccctaaaacctacgtcacccgccccgttcccacgccccgcgccacgtcacaaactccaccccctcattatcatattggcttcaatccaaaataaggtatattattgatgatnnnnnttaattaa

SEQ ID NO: 480 - protein, 579 aa, Homo sapiens; identical to SEQ ID NO: 348

SEQ ID NO: 481 - protein, 19 aa, Homo sapiens
LSENAAPSDLESIFKDAKI

SEQ ID NO: 482 - protein, 43 aa, Homo sapiens
FLVKTGYAFVDCPDESWALKAIEALSGKIELHGKPIEVEHSVP

SEQ ID NO: 483 - DNA, 1740 bp, primate
atgaacaaactgtatatcggaaacctcagcgacaacgccgccccctcggacctagaaagtatcttcaaggacgccaagatcccggtgtcgggacccttcctggtgaagactggctacgcgttcgtggactgcccggacgagagctgggccctcaaggccatcgaggcgctttcaggtaaaatagaactgcacgggaaacccatagaagttgagcactcggtcccaaaaaggcaaaggattcggaaacttcagatacgaaatatcccgcctcacttacagtgggaggtgctggatagtttactagtccagtatggagtggtggagagctgtgagcaagtgaacactgactcggaaactgcagttgtaaatgtaacctattccagtaaggaccaagctagacaagcactagacaaactgaatggatttcagttagagaatttcaccttgaaagtagcctatatccctgatgaaatggccgcccagcaaaaccccttgcagcagccccgaggtcgccgggggcttgggcagaggggctcctcaaggcaggggtctccaggatctgtgtccaagcagaaaccatgtgatttgcctctgcgcctgctggttcccacccaatttgttggagccatcataggaaaagaaggtgccaccattcggaacatcaccaaacagacccagtctaaaatcgatgtccaccgtaaagaaaatgcaggggctgctgagaagtcaattactatcctctctacacctgaaggcacctctgcggcttgtaagtctattctggagatcatgcataaggaagctcaagatataaaattcacagaagagatccccttgaagattttagctcataataactttgttggccgtcttattggtaaagaaggaagaaatcttaaaaaaattgagcaggacacagacactaaaatcacgatatctccattgcaggaattgacgctgtataatccagaacgcaccattacagttaaaggcaatgttgagacgtgtgccaaagctgaggaagagatcatgaagaaaattagggagtcttatgaaaatgatattgcttctatgaatcttcaagcacatttaattcctggattaaatctgaacgccttgggtctgttcccacccacttcagggatgccacctcccacctcagggcccccttcagccatgactcctccctacccgcagtttgagcaatcagaaacggagactgttcatctctttatcccggctctatcagtcggtgccatcattggcaagcagggccagcacatcaagcagctttctcgctttgctggagcttcaattaagattgctccagcagaagcaccagatgctaaagtgaggatggtgattatcactggaccaccagaggctcagttcaaggctcagggaagaatttatggaaaaattaaagaagaaaactttgttagtcctaaagaagaggtgaaacttgaagctcatatcagagtgccatgctttgctggtggcagagttattggaaaaggaggcaaaacggtgaatgaacttcagaatttgtcaagtgcagaagttgttgtccctcgtgaccagacacctgatgagaatgaccaagtggttgtcaaaataactggtcacttctatgcttgccaggttgcccagagaaaaattcaggaaattctgactcaggtaaagcagcaccaacaacagaaggctctgcaaagtggaccacctcagtcaagacggaagtaa

SEQ ID NO: 484 - protein, 579 aa, primate
MNKLYIGNLSDNAAPSDLESIFKDAKIPVSGPFLVKTGYAFVDCPDESWALKAIEALSGKIELHGKPIEVEHSVPKRQRIRKLQIRNIPPHLQWEVLDSLLVQYGVVESCEQVNTDSETAVVNVTYSSKDQARQALDKLNGFQLENFTLKVAYIPDEMAAQQNPLQQPRGRRGLGQRGSSRQGSPGSVSKQKPCDLPLRLLVPTQFVGAIIGKEGATIRNITKQTQSKIDVHRKENAGAAEKSITILSTPEGTSAACKSILEIMHKEAQDIKFTEEIPLKILAHNNFVGRLIGKEGRNLKKIEQDTDTKITISPLQELTLYNPERTITVKGNVETCAKAEEEIMKKIRESYENDIASMNLQAHLIPGLNLNALGLFPPTSGMPPPTSGPPSAMTPPYPQFEQSETETVHLFIPALSVGAIIGKQGQHIKQLSRFAGASIKIAPAEAPDAKVRMVIITGPPEAQFKAQGRIYGKIKEENFVSPKEEVKLEAHIRVPCFAGGRVIGKGGKTVNELQNLSSAEVVVPRDQTPDENDQVVVKITGHFYACQVAQRKIQEILTQVKQHQQQKALQSGPPQSRRK
